United States Patent Application Publication US 2022/0298098 A1 - sequence listing, part 2

SEQ ID NO: 36 - DNA, 50505 bp, Sphaerospermopsis sp. LEGE 00249
  LEGE00249_51
attttagattttagattttaaattgaagttgataaaaacaatccaaaatccaaaataaaaaactcctgccttctgccccctgctccctgctccgttccctattccctgcaaaataagagttttaaaccgcaaagtacgcaaagtacacaaaggaagaagagaggttaaatgtgaaggttaagaagttgaagttttcattgaagttttctaagagttggcggtttatttccgctttggtgattgcttttctgctgacttttaatttttcttgggtagcgacggcagcagcaaagcattattcagatttacagtttactcctttgtcggaaattaaattaccgaaatatgaacggtttgtattagataacggtttggttgtctatttaatggaggatcatgagttacctttagtcagtggcacgactctggttaaaactggtagccgttgggaatcaggtgataaagttgggttagcggatgttgttggttcactgatgcgaactggtggtactctcaaacatcccccagataaattaaatgagatactggaacaacgagcagcttctgttgaaacagagatgagtgaaactgctggtactgctagttttgacagtttgactgaagatttagaaacggtttttgggttatttgctgaagtgttgcgagaaccagcttttgctcaagaaaagttagatttgattaaaactcaagttaagggtggtattgctcgtcgcaatgatgatccagatgatattgctagtcgggagtttagaaaattaatctatggtccagaaagcccgtactctcgcacggtagaatatgcaactctggatcaaattaaccgtgaagatgtggttaaattctaccagcaatattattatccgaataatatgattttgggaattgtaggagattttaaccccaaacaaatgcgatcgctcattcaagaaaagtttggtgactggaaatctaatcccaacatttctaaaactcaactaccgcaagtatcatcagctaatttaggtggtgtattttttgttaatcaaccccaactaacacaaagtaatattctcattggacatttggggggaactttcgataatcctgattatgctgcattaagtgtcatgaatggggtgttaaatggatttgggggaagattatttaatgaagtgcgatcgcgtcaaggtttagcttattctgtatatggtgtctggagtccccgtttcgattatccgggaatgtttatttctgggggacaaactcgttctgatgctacggtacagtttgtgaaagcattgaaaacagaaattcaacggatacaaaatcaacgggtaacagcaaaagaattaaattatgccaaagaatctaccctcaattcttttgtattcaattttcaagatcccagtcaaactttatctcgattaatgcgctacgaatattatggatatcccgctgattttctgtttcgttatcaaaaagctgtcactgcaaccacaacagcagatgtacaaagagtggccagaaaatacctcaaaccagaaaatttagttaccctagtagtgggaaatcaaaccgctattaaaccaccattaactcagttagcagctacagtgacacccatagatgttactattcccggttctcaaacccaagcacagaaataaacaccagaatcaacacaaaaatcaacaccaaaatcaacctatttgcagttcaatactgtttggtgtgagtttgagaagttaaaacttggtaattggtaattggtgattggtaattgttgtctatttactaattgccaatttccattatcaaaactactcaaaaacaggaggccaaatttctgaaatgaccacttcaaaaccaggtaataaatcaggcaatgttaaaatatcaccatcttttaaaatcacagtttcaccattttgagaaacttctaatgttctagttttaggattaattaaaattcccacttgtgaacctaatttaataaattcttgaatcttttctctcagtttatctatagaatcagttttagattttacttccactaccaaatcaggaactaattcggcataatcttctgttgatattttcaatctctcagcacgaacaaaagaaacatcgggcgcacgtaaatcagaatttggtaatttaaaacccgcactagaacccactacacggcctagtttacgaggtctaacccagtttcttaacaaagatgcaaactcagtacctacttcttctggttcataacccgacggactcataataatgatactcccatctactaattccatgcgataatctggatatgctgtctgtatttcttctagttctttcacggttaaagacatgatgattttctcctgaaatactacggaaatactctgctgatttttgtgtattgttatatttgattatatctgatgtgttcaattttaggttaaagatgatattattaataataatattgcagaaacaatacatataggactaattatcgacactactcaaaaacaggaggccaaatttctgaaatgaccacttcaaaaccaggtaataaatcaggaagtgttaaaatatcaccatctttaaaaatcactgtttcaccattttgagaaacttctaatgttctagttttaggattaattaaaattcccacttgtgaacctaatttaataaattcttgaatcttttctctcagtttatctatagaatcagttttagattttacttccactaccaaatcaggaactaattcggcataatcttctgttgatattttcaatctctcagcacgaacaaaagaaacatcgggcgcacgtaaatcagaatttggtaatttaaaacccgcactcgaaccgactacacggcctagtttacgaggtctaacccagtttcctaaaattcgcgcaaactcagtacctacttcttctggttcataacccgacggactcataataatgatacttccatctactaattctatgcgataatctggatatgctgtctgtatttcttctagttctttcacggttaaagacatgatggtttgctcctgaaatactgaggcaataagaatattttaatctaattttttgcaaatagtagaatattactattacatattttgacgatttctttctagtttttcacgaatagctgcttgtactttttcatcaaagtcaggatcattgaaactagcaataattcgatgaggacgctgattgatgcggtctaaatatgtttgaaaagcaattttatctccacgatgtttgaggcaatactgctttaattcagcatcagacatggcattatagttagttaggctcatctaataaatctccatttggtaaaatttgaaattctatttcttcatcatatccagctaatatataatcatataaattataccaaatatcccctaatcataattgactaccattcacaatacatataaaataaatctttaacaaatgataaaaataacaacaccatgccaaaatacgtaatgtggggaagctactgcgaagacgtactaaccaaacgtgaaccccaccgtcaagcacacttagaaggactagcaaaacaaaaagaagcaggaattttaattaccctgggtcctacaaaagatgtcacaaaagtttttggaatttatgaagcggaagacgaaaataccgttcgtcaattagtggacgctgatccttattggcaaaatggcatctggacagagtattctattaaagagtggattcaagctttttaattcataattcataattcataattgccggaggagtcaggagtcagtacgggtttagcagtgctaaacccgtacaggagtcaggataaagaaaaaagaatttattttccctctattcccttttacactgtcacctgtcacctgtaaactgtcacctattcccttgtttacgaattatgaattaatctcttaatgctcttctaaaattgcgacgataggacgaattagcaataaacaacactggccataataaactaaatccaatacgattcagtaatgtttgtgtaaaatgagtcttattaaaaccagaccagaatttcattgcgcccaatacataagtcacaattaacccaacaataattaattccattacaatctactcctgtggtaaatgcagaaaattgtgcatcacgagtcacaaacattgcagagagttgcttaccaaaatacagtttttcaaagcttttcgctgttggtgcaggtaaaacttgactcttaactttgcaatgtcttgatattagttaggaatagtattccagaatgcggcttggtagtcaatgccaatatgggggtatttatagagattgttaataaaaatatagaagtatatataaatttatattacttttgtatattatgtccagtgctactaataaatccagaacacttaggtttggttgttagttgattgttctgaattagcagcagtttataggaatatctagggaaaatttacagctatgttaaatataataagggtaatgtaaatacggggctgtaataatactagttacataattttaagcgtcgatttacttaatttttatcaaatgtttcttgtggaagttcctcaaagatcaatattcataggagactaaataaagaagaaccaatttttataacgaatctcgatgcagccaaggctgtaattaggaggatttatgcgtgcagtgctaatggcaggtggttcagggacaagattacgtcctttaacctgtgatctaccaaaaccaatggtgccgatattaaaccgacccattgcagaacatattatcaatcttctcaaacggcataagattacagaaataatagccacgttacactatttacccgatgtcctgcgagattacttccaagatggtagcgattttggcgtacaaatgacatactctatcgaagaagaccaacctttaggaacagcaggttgtgttaaaaatattgctgaacttttggatgaaacttttttagtgattagcggtgatagtatcacagattttgacctgacggcagctattgaatttcacaaacaaaaacaatctaaagctactttaattttaacccgtgttcctaacccgattgaatttggggtagtaattacagatgaagaaggacgtatcaaccgattcttagaaaaaccttccactagtgaaattttttctgatactgtgaatacaggaacatatattttagaaccagaagttttggaatatttaccagaacatacagaatccgatttttctaaagatttatttcctttactattggcgaaaaatgaaccgatttatggttatattgcccaaggttactggtgtgatgtgggtcatttagatgcttatcgggaagcgcaatatgatgctttagctaagaaggtaaaactagagtttgcatatcaagaagttgcttctggggtgtgtataggtcaaaatacttatattgatcccagtgcgagaattgaaagtcctgccataattggtgataattgtcgcattggggcaagggtacaaattgaagatgggacgattattggtgataatgtgactattggggcagatgcaaatttaaaacgtcctatagtttggaatggcgcaataataggcgatgaagcccaattatcagcttgtataatctcccgtgggactcgtgttgatcgccgcgctcatgtattagaagctgctgtagtgggttcgctttctacggtgggagaagaagcacaaatcagccctggggtgcgagtttggccaagtaagaaaattgaatcaggtgctgttttaaacattaatttgatttggggtaacactgcccaaagaaatttatttggtcaacggggggtacaaggtttagctaatattgatattagcccggaatttgctgtcaaattgggtgctgcctatggttcgactttaaaacccggttctcaggtgagtgtttcccgtgatcagcggaatgtgtcacgaatggtaactcgttctctcattgccgggttgatgtcggtaggtgtagatgtgcaaaatcttgattcgacagctattcctattactagaaccgtgattcccaaaattggggtagcgggtggtattcatgtgcgggtacacccggatcgtcctgattatatcctgattgaattcatggatagcaaggggattaatattaccaaagcccaggaaaagaaaattgagggggcgtattttaaagaagatatgcggagggcgcaaagtcacgaaataggtgatgtggtatatcctagtcaggtgattgaacgttactgtactgcttttgaaaagcttttgaatgtggaaactttgcgtaatagtcgggcaaaggttgtaattgactatgtttatgcggtttcaggggcggtgttaccgcagatgttagataagtttggtgctgatgcggtggttttgaatgccagtgtgaataaaactgcgatgacgactactacgagggaaggtttgttaactcagttaggtcatgtggtggaagcactcaaggctaattttggggtgcaggtatcagcaaatggggaacagttgattttagtggatgagtctggttatcccgtgcggggagaaatgctgacggcgttgatggtggaaatgatgttaacatctaatcctagaggttcggtagttgtaccggttcatgcttctagtgcggtggaacaggtagcacgtcgtcatgatggtagggtaattagaactaaggcgaatcctacagcgttgatggaagcttgtcaaaaaaatactaatgtggttttagggggaagtggggatactggttttatttttccgcagttgcatccgggttttgattctatgttctgcattgccaagttgattgaaatgctgacaattcaagagcgatcgctggctgctgtacgttcagaattaccacgggtgattcataaaagttatactgtccgttgtccttggactgctaagggggcattaatgcgttatttggtggaaactcatccagcgcagaatttggaattgattgatggggtgaaaatttgtcaaccttatgatgatagttgggtgttggttttacccgatgctagtgaacctttggtacatttatttgttaacagtagcgatcgcgattgggtagatgatagtttgagaagctatcgcaaccgtgtccagagttttgtagaacgagaacaggaacattacgcagaagtttgatttctgaatcaggatgtacaggattttctcagtaactcaaccttaaaaaacgtcatacccagatccccgacttcttcaacaattcggggatctattatcaattatcaattatcaattatcaaagccagtgtaagattctgccagaatggcaaatatacatccgtaaaatcctataaattataaataacaacataaatagctgtggaaatagcctaccgttaggctttttcctaacaaccaaatgtttaccttttacaccaagacagatgaagcgtaactattggtggttcttttttcccgacagtttaaacaattacaaatttgggtaatggctaacccgaaatttgagattgttagcaaaattctacggctattttagatgttagttttttacgatcatctttagcactgacagtaaaatgggaaattgaaaagttacggtgaaatcttccttatggctgatagtaccttgagtgtagcaccttgatttatcacacttctgcttcatttatggtaatcctatttctcccaaacaggattatctctactgcatcaattggcaatttattaaccgatcatggaagctggtaaattacacagcttctttttttatagctattcccatgctagtgaggtacaaagtttttgtgttttagggaacagtgaataaattggtgtttacttcattagactaggaaacgctatatcagtaggttaacataattaaacgtaaaatcaaaagtgcatagatcccctgcttcttgaagaagttggggatctaggtattacattcaggtaggggtttagcattgcgaaacccttacttcctacttagtacactatattttttgtttcattatttatcgcaggttagatttattaaatcagttgacttatgactaacaggttacaaatctaattgaaaattctcatactacagatagataaaaatttggtatatttccgatggtaatagaatatatgtttacttcaataggtagaggtttatctattttttaggaaaacatatttattttttatatttttgcaaaattgaagaatttaaatgaagaatttaaatattttagatcaaggtgcatttcatcaaactaaagtattgcgtcaaaaaatataaatttgatgtaagattagtataaagattcaagaaagactatctgcccttgtataaactttcataaaactttcgtgaatatgtaggaaaattatgccatgactaatagtatttcaagacaaagcatgaagaaatttggcattagacatttccgggaattaatgtagagacgttctatagaacgtctctacaagggttttagaaaacgcacatttaattttcggacaagtctattgtcttttaacttggctgataacttggctgataacttggctgataacttggctgataacttggctgataacttggctgataacttggctgataacttggctgataacttggctgagaaacaatttcagatttatgaaaatctgctgatgagaaaattatagtgttaagctagtgttaaaaaataaatagcttcctgtccccaacaaaatgatttgtaggctgcaatttgtggaacacagttaatctgattgggtaatcacaacctaactaacttaaatctttgcaaggtgctagatgaacctgcattgcaggattaaaaacaattagtaattactaattcataattcataattcataattaaaagactgctgataatttaacaattctctaagcagccaggttttgcttgggatctaaatttccattcaaaactaattatgaattaatcaattataaagatttaaaggtgttttactgtatattttttcagccagctttagctgcatagcacgtcataaatatcataaatatttagttagttagaagtgatttatgaattttacatctggattttagcaacagatgtaacaggtgaattagcccaaattttacagtattcggcaactggtaagaattatgtcatcctctgctcatcaaaatcaagttttggatctttacgatgcacacgatagcaagtttttaacaccttttcaaaggagaacattgttaaaaaacttgcaaactgatttacaaccagaatatcgcagacgcattgaaattatcttgttagcagatatgggtaaatctcaatctaatatctgtgaaattattggttgttctcaggagatggcaagatattggatcggtattgctgaggcgggaatggctcataaatggaatgaaagaaggataggtagaccgaaaacagttaataatcaatatattgaaagattgaaagaattggtcactcatagtccccgtgaatatggctatgcttttggatcttggactgctcaatggttgagtaaacatttagccaatgaattaggaattgaaattagcgatcgccacattaatcgcttgcttaaacaaatgggactttctaccaaatccaaaagttcccaacaacaaaaaaatctgccaaatcaggatgctaatatcaccatttgcgatttgcaatctaactccgaacctagtttcaattggtcatttaatttaattcagaccaataactaaacttgggaggtaagaaaatgacatcaactttttctcaggaacaattagccgcacaaattacccaaattttgggtgattctctgtctaaaaaagacttagaaaattgtattcaagccttagaaattattgaaccaccaatagccaagcaattttggcaatcagccaccgcagcaccaggaatttatttagttttggctggtaaagtcagactattagatggtgaaaataatttaattacgactttagcatctggttcatcctttggagagttgacactttttcccgaacagaagtttagcaattatgtagctagagcttctatgaatttaaaaataggttatcttccccaggaggtaattaataagatttcgacagtatgggagcgcctattcctgaaggcagaactttgggatacattgctgttattgtgccaaaactctgctattccccgccatgaatcagtagaggaaatgttaacagcattgtccttatttaccaaacaaaatttagatattggtactgtaaattcccaaatcattaaagatgctaaactgttgttagtaaggcagggagaattacaaaatgctcaaggtacaaaattaacacctggtaatattttggcaaatcccccacagggaaattggcaagcaacagaaccaacaatagcttacattttacgtcaagctgattggcaacaagcaatacaacattggccgcaacttagtacattaattgcagcagaaaatataccaattaccgaaccgatcaagcgcgaagttaaacccaaaaatcccaatgtcattcaatttccccaaccgagaaaccaacctcaaccacaaccgaaacaacaccccaaacaacgccaaaaatactttcctagtcctactgtcaccgccagtaattggtggcgcaaaattagcaaacgttacccatattttgaacaacaaagtgcttctgattgtggtgcagcttgcttagtgatgattagccgttattggggtaaaaatttcagtataaatcgcttgcgggaacttgctaatgttaaccgtgctggtgcatctatgcggagtttaacttctgcggctgaaagtattggttttgctactcgtccagtaaaagctagtttagataaattagcacaacaaccgttaccagcgatcgcccactgggaaggtaaacattacatcgttgtctatgaaatcaccaaaaaacaggtaattgttgctgatcctgctattggtcaacgcaccctcactatcggggaatttaaagccggttggactggttatgcgttgttattacaaccgacaaaatcactcaaagaaaccccagaaacgaatacaccattttggcagttatttgatttagttaaacctcactttcaggtattactagaagtatttgtagcttcggtattaattcaagtttttggactggtgacacctttatttactcaactattattagatagagtcattgttcaaggtagcaccattactttaaatactgttgggtttggtttgctaatttttggcttatttcgtgttatcatcaatggactcagacaatatttattagaccacacagccaataaaattagtgtagccttattggtgggatttattaaacatacatttcgtttacctttgtcattttttgagtcgcgttatgttggtgatattgtttctcgcgtccaagaaaatcaaaaaattcaacggtttcttactggtgaagcattatctattattttagatttactgaccgtgtttatctatgtcggtttgatgttttggtatagtccacctttggctttgttagtattagcaatagttccaccttttgtctgtttagctcttttagctacgccttttttaagacgcatgagccgtgaagtctttggtgcagtaactaaagaaaatagttacttaattcaaagtttatctggtatttcttctattcgatcaatggctattgaacaaacagtgcgttggcattgggaagaattgctaaataacttgactaagaaaaattttagcgttcaggtaatcggcaaccaattgcaaataattagttctaccattcaatccctagctaccactggtttattgtggtttggagcatggttagtgattcaaaatcaattaactattggtcaattagtggcttttaatatgttattgggcaacattattcaaccttttcaaaggttaattgtattatggaatcaattacaagaagtgattgtttccactgagcggattaatgatgtcttagaagccgaagtagaagaagatttagcaatacaaccccggcaaagtttatcaagattacatggaagaatttgttttgataatgtgacatttcgctatcattcagacagcgaggttaacattctagaaaatttaagttttgaaattcaacctgaacaaaatgtagccgtagttggtcgcagtggctcaggaaaaaccacactttctaaattgattttagggttatatctgccgacagatggtagagtattaattgacaatcaagatgtgacttgtattgccttaaaatccttgcgatcgcaaataggagttgttgaccaagaaacatttttatttggtggtacaattcgggaaaatatcagcatagctcaccccgaagccagtttagaagaaattattgaagcagcacaattggcaggtgcagatgagtttattaaacggatgccaatgggttatgaaacccaaattggagaaggtggaggaatgttatcaggaggacaacgccaacgcctagccatagcacgtgcattattaggaaatccgcgccttttaatattagatgaagctaccagtcatcttgatgctgaatctgagagaattattcagaacaatctcaaaaaaatccttaaaggacgcacaagtttaattattgcccatcgtctttctactgtgcgtaatgctgacctgattttagttttagatcgcggtgttttagtggaaagcggtaatcacgaagaattgattgctaaaaaaggacattattattatctcaatcaacaacaactagccgctacaggttaaatcagtaaataggtgacaggtgacaggtgacagtaagaagggaataggaaatagggaacaggtaacaggtaacagggaacaggtaattattgattttcttcccagtcaccagtcaccaatcaccaatcaccttaatcttcaatataaatcaagagacgttgcatacaacgtctctaatatgtatgttgcattttcaactaaatttatttaaaaatcaaagggctttttcatataaattggcttaaaaaaagtaaggattcagggttcagcatcaatgaaagttttcgagtcattggttgttgatgaaaaaactttctcctgtggattcctgctacaaacaaatattctaacttctgactcctgtaagggcgttcgcgaagcgtgctggaagcatcagcattcgggctaataattatcaatttttatcacaggctattttccgaatgcttcgcccctacgactcctgacttcttacttgaaaaagtaatttttcaccttacaaattgacaaatcattaaaatatgccacaatcaacttacaattcatcctcatccgtttttatatcaggacaaactcattctgctgatattcaacaggaaaaacagacagcaactacagcaaaagattggttttatggtacagaagaattattagatgccttacccaaagcctggacacgctcaatgctctatttactagttagttttacagcagtagccttaccttggacaatgttttctcaagttgatgaaactggaaatgctagtggtagaatagaaccaaaaggtgcaacccaaacattagatagtgcagttactggtagtgttattgctgtcaatgttcaagaaggtgcaacagttaaagctggacaggttttagtagaaattgactcggaagttttgcgaacagaactgcaacaaacccaggccaaattagaaggtttagttaatcgccaagctcaattagaattactcaaaaatcaagtattactggcgataaatatccaagaacaacaaaaccagtcccaacaattagaaaaactcgctcaagttaatcaagcaagagaaaacttggatgctaaacaaagtgcatataatctgcaacaatgggaaagactcgctcaaattgaacaagcaaaacaaagcatcaattctacccaaattgcccatcatttagctaaaagtcgtttaagtcgagatttattagaagttgctcgatatcgtcaacttttacagcaaggtgtaattcctcaaattagatttgtggaaatagaaaaaacagcaggagaaagtcaaagattagcagaagaagctaaagctaatattaaacaatctcagttgcgtcttcaggaagaggtaagccgatataactcaatgatgactcaagctaagtcagatattgaacaagcaaaactgcgtttacaagaacaggaaagtagctatcaaagtgttgtacaagcaggtaaattaacattgttgaaaaatcaggaacaactaaaagatttacaaacacaaattacttcagcgacatcagaaattactcaaaccaaaagtcagattaaatcattggaattgcaattacaacaacgagtagtgcgatcgcctattgatggcacaatttttgaattacctgtgaaaaaacccggttctgttgtgcaaacaggacagatgctggcgcaaattgcccccaaaggtgctactttaattttgaaagcacaaatgcccagtcaacaaagtggttttgtgaaggtaggaatgccagtaaaaatcaagtttgatgcttatcctttccaggaatatggtgtgacgcaagggcgtgttacctggatttcacctgatgctaaaattccagaaaatagccccactcgcttagaaacttatgagttagaaattgccttggaacaaccttatattcaagctggtaacaaacgtattcctttaacaccaggtcaaaccgcaaccgcagaagttattgtgcgtcaacgtcgcgttattgactttattttagatccgttcaaaaagctgcaacataatggtctagacctttaatatagtaggagtcaggagtcaagagtaaaactactcctgactcctcaattattaataatggagaattagaagatgtcaaaatttatcagcatttcttctgaggatattctttaccatgttaaaatatcttgccaaattcctaatgtactagaagcgatcgccactagaaaaataattgcggatactgctatcaaagaagatattactatcacaacagaagaactacaacaagcagcagatagcctacgattagccaacaaactgattaaagcagaagacacttgggcatggttaaataaatattatctttctttggataactttgaagaaatcgcccatactaacttagtatctgcaaaattagccgagcatttatttgcagataaagttgaaccatttttttatgctcaccaactcgactacaccgccgcagtaacttatgaagtgatattagatgatgaagatttagctttagaaatattttatgctttgcaagaaggtgaaatcagtttccaccaaattgctcgtcaatatattcaaactcccgaaattcgtcgtgctggaggatatcaaggtatgcgccaacgcagtgattttagaccagaaatagccgccgctatttttgcagccaaccccccccaaattctcaaaccaatcattacatctcaaggagcgcatatcattatggtagaggaaattattaaaccccaattaaatgaacagatgcgggttaaaatcataggtgatttatttacaaattggttaaaacaacaagtgaaaacattagaaataaaagccaatttagaagaagataaaaattatcaatcttctccacaaaaatcttctccacaaatattcagcgaagccagctaaggcaattataaataacaaaacaacccacgagtaaagaattgaaaacctatgatttgtatctggctttttattcattgcgagaaataagcttaactgaactttaatgttcatgttaatatccccaacatctcaaagaagtcggggatatatttatgagtaaccaaaatttaatttgaactatgtttactgctcgtaaatttaccccaatttacctttaaaccagaaaattctaattttttatcctgctttaaatgctgcttatctccagtaaaaatatagtgatcttggattaattgactataaatttcatggggtatatagtctagagggtcgcatccagcaaagtggagaaataaaacgcaagcccaggcatatttaccaaggataatagctttgataatttgttgaaactgtgcgtctttaaatatcttatctaattgttgattttgctcaaaattttcttgaatcataccattacctctaaaatgagaagccaaacaaatttatcaacggtactgatgctaaaatcattagcatttagcatctgggctaaatgctcttacgtgcaactaaaacaaaggagtgtaaatatcctgagaacggggattaagataaggactttgtaagtcaattttcatcgcagaaaattgctgaataatagatgtcatacgaccttctgggctatgatcaccttgctgccaagctgctattaaaccattagcaataatttgacagcgatgagtaccaaaactttcctgctcaccaaatttttgctctggttcttcagcgcaagctaaccccggtgctaataacttagtaaacaaaggtacttgctcttgaaaataggatttattttcctcatatattcttggtaatattgggtgaactagctcatatttgcctttgttaaagtaaagcacggctgagtcataacgtcgataatcgacaggattatatagtgctttaaacgaaaatgaaatgtcgatattatttagtgcttctgttaaactttccatcacggctgctgccccttcaggtgttaagttaaagtaaattcgcgtaatctcatgattattttgggaacctgcatttgctacggccatataaaatcccttctgcaccaaattcttcggcattttaatagatacaaacttaccaacagttaatttttgctttgttggtaacagatgcaagttaggatcaacgtgcagtgttaacccatttttatgcactgccaaactgccatctgtttcttccctgactatctgccagctatgactccagtagccttgacttttgttcctggtatgcaaaagatcatagaattctaaatccactccgaataaactattattttcaagattttggtttactttactattgctttcctcgtcatcaggattttggtcaggttttgtggcaacgttataataagcactgtatataaaattacgcaattgtaactttaagtgctgttgctgcatctccagtggtaacttctcaaagcgagggatcactgactctggcaattctaaagatttgtactttggatgcttgatacagtggtgagattcaattgtaatgttattgacaatatcttctagtgatgtctgcaattgctggggcagttctgcaagttgagactgtaccgaatctaatagttgcatagtttctagtgtagggtgtagagaacagggaacagcacaaaatccaaaatccaaaatctaaaatcgtatcaagcgacagtcattgataaattggtaggtatcaattctgaggcttccatgccaaaaattgtggtcatagatgcttgaggacgacacaataagcttttggcgacttgaagaatgcagatacccgaattaccaaaggttctttcatgttgcaatttagcttgaatagatgtaattaaagaaaaaccggtaaattgtacaactcgttgtaaaaactcaggactacactctaaaatttcgggaaagttagctaaataagtagccattaattctgctatggaaggctgtattagatgtaaaggaattgccgctaaccgcaaagattcttcaatgggtatggttctactagctaccatactatatagccaaatttgtaaataactagcaattattgatcctaaatcattggctggatctccccaagaaccacgttcccagtcaattaaacgaataatttgatcatcttgatcaggcaagaaaaattctgaagatatttctctttctgctgctgtttcccaatttaaagaaagcaaaatattgttaagtttgaggtcattgtgagttaaacaacaaggatgaaaagcctctttcaaattggcgatcgcttttcctaaattatcgtaacgttgataaagtgcaaagaatttcaacccatcagatgtaacgtgaccaaatacttctggtgtaattctatttactcccccatttatctgagaacttgttggctgtgtgatcacttcagaattttggaaaaattgctgatactcttgacggtctaaagttaaacgatgaattgaagctaaattttctcctattgagcgagcaattttagttgggaataaattctccttagcataaaattctgctacatcccgatagttattgagataattaaaaacaatgatggaattttcagcatcaaaatgaattacttctgataaagatgagcgtagatgactaacttctgggaaggtttggaaaaaattatgaacttgccattcatctaaaaactcaccacgagttctaccttctcggttaagacgttcttgttttactaacaattgactaccatcgggcaagctaactaataaattaaaatttttggcagattttaactcaattttactcaatgactgttctgcttgagtacaaattccttgggaaatgagataaggaaaaacgttttgagaacttaaaagaaatgacatagctttactgaacatgaaaaatttttaatcaataatatttgatatttttccagaaaaatccttatttttgcttccgcatttaacaatcatacttattcttgaatattgtacatactttctaataaaaagtctctaccactcaattcataatctttgtttatgaatgaggttgttaaaaatgaaatagcatcaatagccgcaattacaagcataaattcaagagtcttaacaccaaaatttagaatttgataactagaaccatctacaccaccaaatactgcttgatactcctgattattgatttcattgataaatacttctgaatcaataggatgcaggtcagcaataataattcgtgccatttatttaatgctgtaaaaattagatttttttgatttttttattggctctcctggtttattggtaaaatagtcaacttatgttaattagatatatgtgaattacataaattacttttaccgttgatcccaggagagccatttagctcagtcgttcactacaagaaagactattagtagccgtagccgtagccatcgctgtaggacttagctaaataaccgatatggccaataccataggtattcacaaaggcttcagctaattttgtcagtgttgagatatcactcacagagtggtcatatccaccataaacagcaatggaattgacatcactcatttcgttaagaaagctttcggaatcttggaataattcagaaccagctacttgcaattcagagagtttaatactagccataatttcctcctcaaagacttgttctcagtgattaacaattgcactatggggaactacaaaattaccagtagcccttgtcgctgtaggacttagctaagtaaccgatatgtccaataccataggtattcacaaaggcttccgctaattttgtcagtgttgagatatcactaacatcgctatcagagtatccaccataaacagaaatggaattgacatcactcatttcgttaagaaagctttcggaatcttggaataattcagaaccagctacttgcaattcagagagtttgatactagccataatttcctcctcaaagacttgttttcagtgattaaaaattgcactatggggaactacaaaattaccagtagcccttgtcgctgtaggacttagctaagtaagcgatatgtccaataccataggtatttacaaaagcttcagctaattttgtgagtgtggacatatcactaatgccgctatatccaccatagacagcaatggaattagcatcactcatttcgttaagaaaactttcggaatcttggaataattcagaaccagctacttgcaattcagagagtttgatactagccataatttcctcctcaaagacttgttttcagaaagttcaatcggtgtacaacgaaactgtaattagtaccatttttcgctgtaggacttagctaagtaaccgatatgtccaataccataggtatttacaaaagcttccgctaattttgtgagtgtggacatatcactagggttatcataatatccaccatagacagcaatggaattagcatcactcatttcgttaagaaagctttcggaatcttggaataattcagaaccagctacttgcaattcagagagtttaatactagccataatttcctcctcaaagacttgttttcagaaagttcaatcggtgtacaacgaaactgtaattagtaccatttttcgctgtaggacttagctaagtaagcgatatgtccaataccataggtatttacaaaagcttcagctaattttgtgagtgtggacatatcgctcacattgctgtcatatccaccatagacagcaatggaattagcatcactcatttcgttaagaaagctttcagaatcttggaataattcagaaccagctacttgcaattcagagagtttaatactagccataatttcctcctaaaagacttgttctcagtgattagaacaatgatgagaatttgtgggagcggttaagtttttctttgctcaaccgatactcctatttttattgaagaaaatttggaaaatcaagggtttgaactgggttgatcagacattaatcatgaatttatgtcttttttatagctgattaatttttgagttatatacttttacagtcagcattcagcttagtcctaatcataatagattttcgatttacaaatgaatatacgctggatttctggatttataaacgtcatcaattgagaattgacaactgataattatagccgtatacaaagtagttaggacatccattgatcatgaaagtacgcgcgaagcattcggacgataaattctcaatttttatcacaggttattttcctgcaagggcgaagcattcggacgataaattctcaatttttatcacaggttattttccgaatgcttcgcccctacgactcctgctataatcaattattaataaaaaaatcgtgcgttatccatttctaaacagaaaacacacgaatatggaaactatggttaaattacccagccaatctgttaaaaattgattgactgtctcaagtcctcaagtgtggtgtcaatgtccattctccatctatcgagattagtattgatgtcttccattagcgcggaaatatcactactttctaatgttgtgtttggatctctccttcttcttctaccaaaaccacctttgatattgatcatttccccaggagttgcttcctgaataaactgtgcatcatgattagggtagaggtcataaatttttatgcccatttttggatcacctcctgaaatactggtttgaatagaactgagttaaaattttaaattcccttgcttatattgtgaacttatatctgataaagtcaagatttttagagccattttccagacagaatttcatgagttttgtctaggaaactgatagttttttagaaatgcaattttctattaagtaggggttgctgagaaagtcttgtcgtggagacagggaacagggaacagggaattgggaattgggaattgggaattgggaattgggaattgggaattgggaatatatagtaagaatttagtttttacccagtcaccagtcaccagtcaccagtccccagtcaccagtccccagtcaccagtccccagtcaccagtccccaatcaccagtccccagtcaccagtcaccagtcaccagtccccaatcaccaatcaccagtcactctattccctatgtatgcccaaggtgcagttatcagcggactttgataaattaacttctcaaactcacaccgaatttttctactaaagcttcccgcactttattatgtacaggttcaacttcattatcagtgagagtgcgatcgccagcacgataaactaaacgaaaagctaaacttctttgacccgcaggtacattttcaccacggtattcatcaaagacttccaccgattctaacaaccctttcccagctttgttaatcactttttccagttcggaaactgtgactttcacaggtgcaaaaaatgccaaatctctatcacttgggggataggtagaataggatttaaacttgggaattagtaaatcatcattatccagtgcatttaacaaagtatccaaactaatttggaacacataaacctcatctggtaaacccttatcccttctcagttgggggtgaatttgtccaaaagttcccagtctattacctcccaaccataaagaagcagtgcgtcctggatgtaaccggtaatctctattttcaggttgaaattctacctctaaaccaaattgttgaaagacattttctaaaatacctttcgcttcaaaccaagtcatcggttgttctcttccaccacgagaccatttaccaatgctagtatcaccacccatgataccagctaacatttccgcttcatctaacccttcttcttcttgccagaaaatgcgaccgatttcaaaaccatttaacgctccatttccttgttctaaattgtattgaaaagcatcaatcaatccagaaattaaatcagttcgcaaagctgaatactcggcaaataaagggttactcagaacaatttgtttgtcttcccctggtttaactaaagaatattgcattaattccgttaaaccttccgccctgaaataagcacggatttttcgcagtagttcttgatctaaaggtaaataaccaggttcggttttttctggtaaagtatcaacgaaattatcataaccataaagacgggcgatttcttcaattaaatcaatttcccgttctaaatcacgataacgataggctggtacttttaccgtccaagtgcggtcattgttatcagttaattcacatcccaaagcagtcaaaattctttctacatctgctgcttctaattctcccgtttctaatcctaaatcaatgggacctagcacttcattaattctatctaaccgcaaaacaatagaatgtgaccatgtagcagcatcaggacgattatcaactatttcctgttgaataatcacaccatttgctaattcttgaattagggataaagcgcggttgcaagctgtttctaattcggcgcgatttacacccctttcatatcttcccgatgcttcacttcttaaacccacaccgcgagaagaacgacgaatagcaacagaatcaaataacgcagcttctaaaactaaactggttgtaccttcgtaaacttctgtttcttcaccacccataactcctgctaaagctacagcttgattattagcagtaattaacaaattctgagtagataaattgcgagtttgtccatctaaagttttgagagtttccccactttcagcaaagcgcacaccaatggttaaattttcaccaccagctacagattttaaacgctgttgatcaaaagcgtgtaacggttgtccccattctaataacacataattggtgatatctaccacattattaatgggacggactcccgcagcaagtaatttttgttttaaccactcaggagaaggggcaattttgatattttctacaacagttccaatgtatgcaggacaagctttattttcggaaatcttcaagcttaaatttccagcattattattaattgtgactgctggtggttggggaatagataattttccaccggttaaagctgcaacttcccgcgcaatacccaccatagataaagcatctgcacggttagcggttgcggtgacatctaaaatgacatcatctaaacccaaaaaaggacgtacatcactacctaaagtgagattttcttctgtgaaaatatgaatcccgtctacatcggtaggtaaacccagttcttttaaagaacagatcatcccgttagagggtacacctctaagttttgtgggtttaatttttaagtcaatgttgggtaagtaagtacctttggttgcaactggtacataaatatctgcgcggacattggacgcaccacaaacgatgtttaatgtttcctctgcacctacatctactgtacagacacttagtttatccgcgttggggtgctgttcccgttgcagcactttaccgatcacaacgccatccgcccaagtgcgccgatcttctatatcttcaacctcaaaccctgccattgtcaaggtgtgggctagttcttctggagtttggttaatttctacgagttcccgtaaccaattgaaagagatacgcatttagttgtcgttgtgtttggatttgtgtttggctttaattttataattaattttattataatttttaggatatttagctgtgtatgctaaagttcaagatatgattcacaaaatgattatcaggtagaagttatgaatgagcttaggctggaattacctgcaaatatttctattgatgaggcacaactattgttgacagttaaattatttgaatctggtaaattatctttaggacaagctgctaaactagcaggttactccaagagtacatatatagaattactgggaaaaatgggagttcctgtaattaattatccacctgaagaattagaacaggagatgaatctgtgagtgaagttgctgttactaatagtacctgtttgattggtttagaaagaataggacgtttagaaatattaccacaggttttctcttttatattcataccattagctgtacaaaaagaagtaggtattaatgaagattggccaatagttcaaccagtggctaatttagctttagttgctgctttaaaaacccaacttgatccaggagaagctgaagctatcacactagcaatagaattaggagatgtatttttaattatagatgaacgtaatgctcgtggtattgctcaacaaatgggtttaaaagttataggtacactaggaatgttactacgtgctaaagaaaaaggtgtgatttcggaagtgaaaccattgattatgtcactagaatctgttaattttcggatagcacctgctttaattcaaaaagctttaattttagctggagaattataaattttacgatgttgtttatagtcataatcatcttcatattcaattgtaccaaatagttctataatttcctgttgttttcgtcgttgtataaattgttttaaagcttctgcaattacagcactttgatcactataaccactcagttcaagtgcttctttgattaagttttcgtctatttctaaatttgtcatcatattgtatttttctctaaaatttcatttaccaaactattgccatgtttaaaataaatcctggtaaaatatcttcccctgataattctaagggtgcggttaatatttcgactggtttacctaaacgataaatttctacttggcgtgtttttggattaatcaaccaacctaattttacaccattttccatatattcttgcatcttcttttgtgtttcttgcaagctatctgtaggtgacattaattctaaaacaaaatcaggggcaatgggagggaacttagttttttcttctgtggttaaactatcccatctttcttttttaatccatgcaacatctggagaacgatttgcaccattaggaagtttaaaacaggtggaagaatcaaaacacacgcctagtttagtttgacgattccaaacaccaaaatcagcattaatttctgaattaattcttccagtttcccctcctgtgggtgacatgactaatagttctcctttagcgttgcgttcaaattttacatcaggatttttccgacagagttgataaaattgatcatcggtaaatctgacgataggatttaggttaatggttatggctgtcattgtcaatatggggtgataggataaaacaggtatttttcaatattgtcagaatcaggatttccaggattagaggatttacaggattagaggatttacaggatgaaaacagatatttgtcagtaattaaccatgattaggattaactagataattagcaactagagttaggaactatagttagctaattaatagctatatcattttactcccaatcatagatattatatcaaatcaggacaaaaatttaatatattttaccagctttctagttacttatcctgtaaatcctcaaccaatttaaaacctattattgatgagcttcttatttctggctgacggctgaatgcttatacttaaatctcgtaataccaaatattttcttttttgacaataatccgattcaaagacattcgatcaattactccttcatcttctaattgtcctaataatctagtgatagtaacacgggtagaacaaacaagggcggctaagtcttcatgtgtcagtcgcatattaattaatctccctgtttctacctgtgagccaaattttttagataaccatgctagaagttgaattagcatagtttctacttttttatggctacgtattaacattaattcttctgcttgatggatgtgctgaagtaaagcatctgtaaattgctgcaagttatctgctgctaaaatattcgcttctacattagttaaacattctatgcaatagggtttgatttttgacagcatttcacccactatatccccaggtccccataaacctaaagctactgttgtaccgtcttctaagtaagtataagtcatgacaaagccgctttctatttgccagagggcatttttttgactgggtatgagcgatcgcctggaaaaatgaaacttttggcgatcattatcagtagataacccgaaaataattgtatttaaaggcataagtatattatattactattttccgatgttctaaccgtagtatatatgatttcggatcagaaagtcacgccaaaaatatcttctagggtaagtcagaccgcacaaatcaagtaaatcaagcaattttgacatcgggcgcaccctacaaatgtgttgatttctggtcaatatagagcaactatgggaattatattaaataactacggtaatccgatagatttatgatattttagtaaaacaagtgagaagctatcacatttaacactttaaagtagacttctttcgtaaaaaggttcttaaatctatcaatgtacagtagtattttaaatacagacgtgaatagtcaaagctaccgtctcctggaactttccgccaaggtggaatacgcacttttagcactgctagaactagccagccaccatgatcaaaaagttactctaactataagtgaaattgcagccaagcaacccatcccagagcgttacttagaacaaattctcactcaactgcgacgtgcgggtgtggtgcagagtcagcgcggttcaaaaggtggttttcttttagtgcgtgaaccttggcaaataaccttactagaaatagtcaccttggtagaaggagaacggaaagagaaagaaaattctgaaaatccaactatagaaaggactctagtgcgtgaaatttgggaaaaagctaacaccgcttctagtgaagtgttgcgtagtcacacactccaagacttatgtcaagaaaaagaaactcgcactcaaaatgatcccatgtattacatttagtgtgactcatcagctaataaatatgggaaaagcaattaatcaattaatcaattaatcaattaatcaattaattctttttcatcaaaactaacaaacacaaacaaataccaaggagtttgatcggacttaatgcctgattttgatagatgattacaacacccaaacccatcattacaaaaggtacaacataactaccataattagttaaaaaatttgctatttgcttctggtgggttaacttataagctgcgtaacaccaaactgacaataggaggaaaaagacaagtataatcactaaaaagctatctagtttattggtagaaaataaaggtatataaacagtaatattatcactgccattagcaatagtaattagagtaatggtataaatttgagaacttaacaaattactttgacttgatgatgcaaatggtgtaatctcggtattaatttcagccgataaattggtatcttgttcttgattaactaaactactaatacctatagataaaggaatcaaacctaataaactaatccagtttgtaggtataattaaaccactcaataaaccaggtaaactgagaatgacaagaatcgtaaaacccaaatattgacctaaaacaatttgccaaggttgtaaattatcatcagcttgggcaaaaaagaccagcaaaatcacaagatcatcaatattagtagcaataaaagttacaactcctgtgattatagatatcaataaatcattcattctacatcattaatcttcaatcatcatgaatagtttaattactgcttttgctcagggtattatcgcttttgcatccactaatatagacgatattattattttactacttttattttcacaaatagatagtaattttcgccgtagacatatttttatcggtcaataccttggttttttagctattattattcttagtttaccaggtttttttggtggcttagtgattcagcgagaatttattggattattaggattattaccaatagtaattggcattaaatatttattgaatcgagaagaagaaaatacagaagtacaaacagtaaatagtgatttattagagtcatcacatcccaatcccatatttgcttttttattaagtattcttcaccctaatacttataaagttgcggctgtaacgctggctaatggtggtgataatattagtatttatattcccctatttgctggtcagagttttggtagtttaggaattattctgattgttttcttatctatggtaggggtgtggtgtggtattgcctatttattaagtcgtcaagctgctattggttatattctaactcgttatggtaaggctttagttccatttgtgttaattggtttgggattatttattatgtatgaacgtggtactttagaaatgatcaaatcattgttataagatatttgaaaataaaatattggaaaagtattttcaggtttacagatattttttatttcactaaatctctattaagatggagaaatgtgattttggttaacccctacttatgctggtaaaactaacttccaacttaccatcattaaaatgctgtatataatcaatttcaaagggcgttgaggtgtaatttcacaaagtttagcaccaataattacaccgggaactgaaccgatccaaattggtatcactaaaccccaattaactgttcctaatgtgagatgtcctaaagatgtgaatattaataaaattgcggcttgagtaatatctgtacctactaatttacgggcatcaagacgaaagaaaaccatcaaaaccaaggcaaacatagaaccggaagaaacgctagtcatacccacagaaaaacctaaaagtgcgccaattaacaatgttaaaaaccgcccttgattagttttaacatttaatgttggtaattcgggtaaattgactttggggaaaaacttcactaacaacatttggattaatgctgtgaatgtgacaattaaaatcattactcccaataaccgcagcaaaaaattatctatgttgaggttactgtttctgagttgatgtaaaactgctacacctaacaatgaaccagaaacgctacccattgccaaccatttaactatttctatatctagggttttttgttgccagtgtttgactccacctactactttcattaatgtggctgctacaacatcagaactgatagcaatagaaggcggtacttgaaaaataaaaatcaacattggagtgattaaagatgcgcctcctattcctgttaaaccgacaataataccgatgaaaaagctgaaaactggtagtagtaagtagtccatgttcctgttttgtagtgggttttagctgtgatctgtaataacttctcaaggatgagttttccctctggtgaaaatttaggttgttattttcttaacctgattgtcttcacttggattaatcaccgtaatcttgattgacttaccgtattttaatagtacacctgggaaaagtatattgtcaaggtctgaaaatgaaataattttttgttgattttgtggtgattatttgctgacgaatagagaaaaaatgatcaatagttgaggaaatacaaactacagctatgggggattttattgctagttaaataataataaatcctaattaaacgctaataataagttacttaaatagaaatatttgcatcaaataaaaaataaacgcagctactatgaaaaatttcttataaatcttttacttttgtgtaatttgcgcttttggcagtgtaataatattaattttgaggcaatactgttagattaaggatttttgtaggttgggtttaccgtgtggaaatccaacaaacccttgtaaatgttgggtttctttcctcaaaccaacctacgttatgtcgttgttttagggttaaccgaaaagtattgaattactaatagctaattactaatagctaatttcttaacttatgaataaaatgaaaatgatgaaagaggaacacacatcaaaggttatggtgatcaaaaacctgctgttttctaattggcgttctttgttgctgatgttgataggtgtgtatttacctttgcaagttgtggaaattatggcggtgaaaatttggcagaataaagatagcttttcttgggatgtgccgattttgatggctattcatagtatagctaatcctcaactagatgcgatcgcagtagtgttaactaagtggggatcattttggactgcatttcctgtgttgagtgcgatcgccataactttattacgcaaccgcagatggagaacttttaattatctcatcactactgctgtaggaaatttaattatcaatcacacagccaaagaaattatacagcgaacacgccctaatttatggatatcaaaagcaccagaattggattatgcttttcctagtggtcatgccatgacaactatgacattagtagcaattttagtaattttaacttgggatcgtccttggcggtggttagttttaattattggtagtttttacctcttaattattgcttggacaagactatatttaggagttcattttcctagtgatatacttgcaggttggatgcttgctttagcttgggctattggtatgaatttaattattaaaccataattattaaaccataattattaaaccataattattaaaccataagtcttcagccgtcagtattcagccattagcaaagaagaaaatcatgaataatagctgattactgatagctgaatacttaatgaaatgcttaatgaaatgactaataacgactaaccagtaaaaattaagatttttgagcaggtgcgttaatcactcttgcatctacaatagcctgagaaacattaggaataaaccagttaatttcaccaggtttgagaatttgtgttcctgcttggctaaactcaataacacctgtatctgggttagttgtcaaaactaacttagtgccattagtaactttaacaattgaatcacctgttaattcttggttttctccatctaaaccaacagctacagctttaacatctgaaggtatataaactccttgacaattccatttatttttggttgtctgattatcacctaaaaaatataaagctgatcctggggaataatcatcttcttctaaatttggttctggtccataaatagctattgttttacctgttttattaatacattgcccccaatcaatccctgattcaaaggctaatttttgtaattttaaatcactgattttctgctctaattgttctggtgtatagccttggggtaaagtttgtgtagcttttgcgtttgctaactggttcaattgttgagtcagggctatgtaatcaggatttttcctatatctgggcggatctgctaacgcagattcagaaaataataaactgatacagcataacgcaatcatcaatatatacttgagacttttcatggtagtaattcctgatttgagaatatttagattatccatttgacccaaagtagaaatgaaaaaacaatcatgtttctgcttactgaactgttcgctagtttaaattatcataattaattcaaatgggcaagaatatcatttagccaattagaatacccagtattaacttgaatttgcatattaaaaaatctcaaaaatctataattttataggcttttacctatataacactctaaataactcatgattaagtagtgtatttttacatacttttattaaatcttggaaaagaattttttatacaaatttaattcccaccaaatccgatgctcttttgagtatttatcaaaagaaaataattttacaaaaaatatcagaaaaaaatagataaaccacttgcataatatcaaagcatcatgtaatatttgatttgtcaaagaaaacacaaatcctaatagtagttgctaggaatagatatggggttaatctatcaacagcagctacagattctttaagggaattttgtacacataaatcacaggtctgaatagcctagaaggtataactaaaaattagccataatccaatacagatcaggaatttatttctgtggaattggctggtaaatatgcacaacaaaaggaaaactttaaacttttgtaaatttttattacttgccatcaggtattactcagacaacaatcaaaatctccctattgtccatctatgtatgcgtcatttcacacatcatttcacaatagagaatcctgaagatgaacacagaaattaaatcacctcaaagttttcacggcttaaagccaaattgcctttctttctcagaagttttagctcaatcttttgcggttattgcaccaacaactgtacctgcatctaacattggtttgattgtggcgctctcaggaaatggtacttggctaagttttgtgattggtttgatgggattattattagttagcattaatatcaaccaattcgctagtcgttccgcttctcctggttctttatactcatacattaccaaaggtttaggagcaaccgcaggtgtaatttgtggttggagtttggtactggcttatttatttacaggaatgtcagttctttgtggttttgctaacttttttgggatttttattagccatttaggtattcatccttcgagtattacactattagctattggggcaggaatttcttggtatgcagcttataaagatattcaactttcagcagtagctatgctgtggttagaagtagtttctttagttttaattatcattttgtgcctgattatttgggcgcacaaaggttttgctgtagatatgtctcaattaactttatctggtgtgaatcccggtaatatagccactggattagttttagttatgtttgggttctctggttttgaaagtgccactagcttaggagatgaagccaaaaaaccattacgtacaatacctaaagcagtgatgggtagtgttattcttgcaggtttattttttgtttctactacttacatagaagttttgggttttagtggtactggggtatctattactgaaacagaagaacctttagcttttctttctcaacaagtaggagttggttttttaggagaattagtaggtttaggagcattatttagtttctttgcttgcattttaggaagtgttaaccctgctgctagagtagcttttttaatggcacgtcatggtttatttcatgcgtctttaggtaatgcccacgcagaaaatagaactcctcatgttgctgttacaatgtgttcatttttgacatttttagttccggcgatcatgtcttttttccacatcaaactctttgagtgtatgggatatttgggtgctatttgtagttatggttttttaactgtttatattttgatttctgttgctgctccagtctatctacacaaaattaataaactccgtctcatagatatagtattttctatgttggcggtgggtttgatgatgattcccattttaggaagtgtgggtattcctagtagtaatctttttcctgttccagaagctccttataatctttttccttacttgtttttaatctatcttgttactagttgtagttggtttttaattaaaaaacaacgctccccccatttagtagcaggaatgcagcaacgagttgatgaaattcatgcgagttttgcggaaagaaataactattaacaggtggtaatttcccaaatctcaaatctcaaatctcaaatctcaaatctcaaattcctatgagtggtgtaatcacagcaattagtacaggggcggccgcttttagtgccaccaatattgatgatttagtcatcttaactttgtttttttcacaagtaaatgtcaaattccgtaaatggcatataattttaggtcaatatgcaggttttacagctttagttatggtgagtttacctggtttctttggcggtttaattttacctcgtccttggattggtttatttggtttaataccaatcatcatcggcatcaaaactttactaaattccgaagatgaagaatcagaagaagtagatacaaatacagaaacatctcatgaatcattgttagctaaattttttaatgtgcaaacttacagtgtagctgctattactttcgctaatggtacagacaacattagtatttatgtaccgatatttgctagtagtaattggcagagtcttttattaattttgggtgtgttctttttgtccgtgggattattgtgttatgtggcatataaattaactcataaccaggcgatcgctcatcttttcacccaatatggtcatcgtttcatgccctatgttttgattggattaggtacttttgtcttcattgacagtcatagtttaagtctaatgaatttactgaacagataacaaaggacaattccccttattttcacctcttgctgaccgttgatagctgatggctcaatacttactaaaaattgctaacagctaatgacaaaataccaatgaatagtgaataatgactaataaaccaagaggaaaaaattttgactatactcacattttctttattagtttggctgggatcatttagtgctgggttagtaggatcattaacaggtttaggaggcggagttgttatagttcctttattaacttcagtgtttggtgttgatattcgttatgctgttggtgcatctttagtctcagtaattgccacatcattaggttcagcatctacatacattaaacaaggatttgctaacctgcggttaggaatgtttttggaagttgccactaccattggtgcaatgattggagctttattagctgcctttgtttccgtgaaattcttaacaattattttggcagttgttttaatttattcagcatatttatcccaacgcccaaaagcagaaaatcaagaaattgccgaaccagatcccattgcggaatatctccaactcaatggcacttatcccacacctaacggtgtgataccttatcaaataaatgccttatctgctgggtttagcattatgttaattgccggtgtgctttctggtttattaggaattggttcgggagcatttaaggtattagcaatggatcaagccatgcgtctaccttttaaagtttccaccaccaccagcaattttatgatcggtgttacagcagcagcttctgccggtgtttatttaagtcgtggatatatagatcctggtttatccatgccagtaatgttgggagttttaccaggcgcttttttaggagcaagaattttaattggtgctaaaacccaaacattgagaataatttttagccttgtgctagtcgtaatggctatcaaaatggtgtacaacagtcttataggtgggttataattatgtatagattaaattcgggttttcgttggacttcatcaatacaacaagaaactgaagtaatgactctagctttaatatctgaagaaccagattcagatattcaacaactagaaaaacaacattttaatcatgtcaatcatctcaattatcagggtgtaattgcaaataatcataaaatagaaaaattggcgggtgagcaattattagaaaatctgctcagtaatttactcagatatggtgttttgattgccagttctgtagtatttataggaggaatattatatttaatcaatcatggttcagaacctgctcaatatcatatatttcgggggacatctcctgaattttgctcacccattggcgtattcacagcaattttatcaggtagtcggcgggcaattattcaactaggacttttaatattaattgctgttccagttttacgagtccttatttcttttttgacttttttattcctgcgacaatttatttatgtagtcattacttctttagtgttaacgagtcttatttacagtttgctcagtgcctactaatatgtaataggtaaaaaatcagtagataaatccccgaattttttggtcattcggggatataatcagatatttataccaatcatgtgtaccaaattcaagaatcaaataactacaaagaagacaaagtacacaaagaaggaagcaagatattcagaaatttggcacattcttctacagaaatggtattactaggaaattaacaattttttcttagtcatttttaagtttttccaaagaatctgaatttgtttataagcatcctctggggaaagtttaccaccagtttgtagaccacaaatgtagttcaccctttgagaaaaatcttgaagatgagcattaaataataaatattctggttcaaactgtccataatatgcactacgtggataaagaaaatcagatatttctgagagaaaataagggtcttggttcatatagaagcaggtagttagaattaaaacaatcagaaattatgcaagtggtatttaagaaaattttatgttagtatttcataaactctctttaaatgcagtattagtgaatacatttttcagtattcttatagttgtaaacactggtaaatttgactataatgatcagtaactcaacttgacatttgctgtaatacccggataacccacttctttaagaagtcgggaatctatatactattaactacagtatttttgtatatttagtgtatagttactaaagtcatcatataattttgcacgatagacataattacagaatattgtatcaacatgatcaaagaatacgaccgagatgaaaaaatatcacactttcaaaaaagcaggtaaactcacagctttaatatgtttaattactattttagttactccttttgttatagttaatgctggtgagcgtggtgtattaatgaagtttggagaagtgcaagatccagtattaggcgaaggaatacacttaattattcctgtagtgaatacagttaaaaaattaagtattagaatccaaaaacaatctatatctactgagtctatatctaaagatttacaaaatatttttactcaagtagtgctaaattggcatattcaacccataaaaacaaatctagtatttcaacaaattggcgatgaaaaaaacattatagatatgattattgatccagcaattgcagaagttgtaaaagctatagtcgctcaatatacagcagaagaaatcattactagacgtgaagatgtgaaaaataaattagataattttttaagacaaagattagataattattatattgtagttgacgatgtatctttagttaatatcaacttttctgatcagtttatagaagctgtagaagcaaaacaagttgctgcacaggaagcaaaacgggcggaatttttagcgattaaagcagctaaggaagcggaagctaaggtaaatttagccaagggtgaagctgaatctttgagtttattaaaaaatattttgactccagaattattacaaagacaagcattagaaaagtggaatggtaaattaccgttaattgtcggtaaagaagattttaaaattggcgatattcaacagttaattacagcaagtgaaaattaagttatttgtaataattcaggagtcaggagtcaggagtcagtagtcagaatattggataaatcagtagattatcaatatgtgatttttagtctaacccttaaaaagctgatttctgttagctgatagctgaatgcttacagttatttttttaatcatgaatcttgattttaaatcccctcttggttacaattggggattttattgtttatgaattgttgaaaatttctagaggaatatcaataattttcaactgaagtaaaaacacaattaataaggtatatgcagttgaagaaatcaaagtattgaatatctcttttttaagattacgctcctggggttgtttttgaaaaatatcacctgctccaaattgcatcatgagaataccaataatatttgataaccagtaaccaataattgtgcaaggtaaaagtaaattttctgacaaaaaactgcacacataaccaaaaaagtacgctatcggtagattgaataataaatcattccaccagcataatggagaaagcaaatatccgaaaacaacaaaaaaccctcctcttaattttttccaaatattgctgcttggttggtgggaggtggtttcttttttctcttctaaagtgggatcaaagttttgactggttacggataaatttttcataaatacactatttctatcaaattagtgtattttaactgtaaatcaaaaaaaagtccatagttattaatgcaggactgacgcaacaggcacataagtatggtgtgcaaaaccgcataaattatgtaaatacacatattattgatatctgaagcaccagaaaacttgatgaagtgcggaatgtgggtaaaaattaaggtgaaagttagataccataaaaacacctaactaaccgccttaactctcttttactaacccctaccaccaccaataaaatataacaatgccattctcacagctacaccgctagtcacctgatcttgaattaaactaaattcaggatcatccattaaatctgaactaatttctacacctctattaactggacccggatgcaaaactttcacatttgatttacaggctttcaaccgatttctagtaattccaaataattgatgatattctcttaaactgggtaataaatgggctgtcattcgttctttttgcaaacgcaatgtcattacaaaatcagcattttctaaagctggttctagttgccaatggataaataaccgttctgcatttgctgtacctcctaaatattcagcaaagaatttaggtaataaagtgggaggtgctgctaaatgcacttctgcaccactggcggttaaactccaaatattagaacgggcaacgcgagaatgtaaaatatctccaacaatggcaatttttttacctgctaataattcgattctcggtttttcgggattaattaaactacaaattgtagataaatctaataatgcttgagatgggtgttcatgttgtccatcacctgcatttaagacactgactttttcacctaaacgatccatttcttgggcgatcgcctggggtactcctgcttctttatggcgaattaccataatatctgtacccattgctaaataggttttagcggtatctaatattgtttctcctttagtcatggaagatgtagccgcagcaaaattcagagtatctgcacttaaccttttagcagctatttcaaaactactccgggtgcgggtagaaggttcaaaaaataaatttgccactacctgtccttgcaaagtgggtacttttttagttctgcgtgatagaacctctctaaatgaagccgcagtttgtaaaaccgcattatattcagccgttgtgaagtcagataaagaaagaatgtgatgacgattccaagtagttgtaggcattgatattttcagtaaggagtcaggagtcgtaggggcgaagtagggacgaagtaggggcgaagcattcggaaaataaccttttcataaaattgataatttatcgcctgaatgcttcgcccttacaggaaaataaccttttcataaaattgataatttatcgcccgaatgcttcgcccttacaggaaaataaccttttcatacaattaataattgtttgcccgaatgcttcgcccttacaggaaaataaccttttcataaaattgataatttatcgcctgaatgcttcgcccttacaggaaaataaccttttcatacaattaataattgtttgcccgaatgctgatgcttccagcacgcttcgcgaacgcccgtacaggagttcaggagttcagaagtatggcttcgccacgcttcgcacttcaggagttttttaattgttctgttccctattccctattccacattaccaaattttaagttggtaaatgaaagactttcaaagcaatagaaactatgctcaggaaggtgacaaaaccgatagtatccagcatggtggttactaatggaccactcattaaagctggatctaattttagcctttgtaatcccattggtagcaaagttcccaagctcaccgccaccattgtattcgttgccatgacacttccggcaactaaagctacccatctttcattcggttttgcccaaataagagaaagggcgatcattgttacacctaatgcaatagctgttcctaaacctgctaaaagttctttgcggagaattttcccagtatcttctgctgttacttctcctacacctaaaccgcgaatagtcacggttaaggcttgaataccgacagttcccccggtgttagaaaatatgggcataattactgctagaaccggtacagccgcaataacttgttgaaagggagcgatcgcactagccgcaccgatgtacaatgccatgatacctaataaccaaggcaaccgtttacgaatggtaacatgaggaggagacaaagcttcttcatcgccactcacagcagctaatttttggatatcttctgtagcttcttcttctaaaatatcaatgacatcatcaatggtaataatcccgactaatctctcttccctatccaccacaggcatggcaattaaatcataacgttgcataattctggcaacttcttcctgtagggtttcagttttcactttcacaacatgagaactagcaatatccttaattaagacttcgggaaatgtaaataataactgacgcaaagaaacaacactaactaatttacggttatcgtcggtgacgtaagcataataaattgtttctttatcttcgtcttgtaaacgaattttgcttaacgcttcacctacagttaaaccttctcgcaaccgtacatattctgttgtcattaccctgcccgcagtaccttcaggataaccgagaattgttgctgttgcttgtctttgttctgggctaagttgttgtaataaacgtttaacaactcctgcgggtaattcatcaaataaatatgccctttcatcaggactcatttcttctacaagatgtactacttgggcatcatgtaaagagttgatcagttcttcttgtacttctgtgggtaaatattcaaatacatcaatagcttgatttttgttcagtaaacgaaaagcgatcgccctttgtttttcaggtaattctgaaatatattcccccacatccacaggttgtagattatttaaatcacattttaattgatttaagtcagcaacatccaatgaattgcgaacatcttgtgtcagcataataaattcctcctaatgtctccccctcgctgggagactttctcgccagcttaggggaggatactactgccatctggtggacttttgtccataaaatcttcagaactcaatattgatatttaatcaagtcatcattaagttatcatcctaacccggaaagggctgatttgataacaacctggtaataatgatttaaattgtatcattttacacagatatatattttagatgccttgattttttatcgtatagatgtagtgattttactactatattaatctgtgttaagtctattaggcactttactggaaatctttacacaatggagatatctctggttacaaatctggttttcactatgttcaggggttttgtggtaagaatcgggtaatataaagataaaagcaagaaaacctataatcttaatttactgtaacatcatcagcgataacaaccagttcaattactttttcatgaggacaacatgagaattaagcaaatttcagtaacagaactttttggtattttcaatcatgttattcccttgaatacagaagacagaataactattatatacggtttaaatggtattggtaaaactgcgatattgaaattattgaattatatttttagttttcagttcttagaattagcaaatttccctttcaaagagatacaaatagattttgatgatggtagttgtctgtattttcatgtacaagcaggatcaaatattgatgttaatacacaaaaatccgagataagaattgttgccaaaacaaatattagtagcgatgaatatgaattttatctaaattatcatgatgaccgtgtagaaaataaatcatttaggataccttttaaaattaatgaagattcgatgagcgataaagaaagatttgtacttgctctagaaaaccttgaagaaactgtaaaacttgtctatagattccaacctaaaaaaataccagaatggttacaagatataattaattctatagatattcatttaatagaatcccagagattattaaacatatcagaatatcaggaaatgataccatctgtaaatgcttatgccaatgaactggcagaaaacatccaggaaaaattagctgaatatggtacattatcacaatcactagatagaacatttcccgttagattagttcaaaaagcatcaacaaattctcttgcaaatgatcaacttcttaaaaaactagatgaaattgaaacaaagagaaaacatttaataaatgctggactcttagataaagatgaaaataccaactttcaaatttccgaacaaatagatgacaacatcaaacaagttttatcagtttatatagaagatgtagaaaaaaagcttgctgtatttgataatctctctcaaagaatagaactgatgaagaaaataataaatcaaagattttcttacaaagcaataaatattgacaaagaaaaagggtttacatttacttatgacggtaattccttatcccctgaaaaattatcgtctggagaacaacatgaattagttatgctttatgaattattatttaaagttaaacaaaattcattaattttaattgatgaaccagaactgtcactgcacgtagaatggcaagtgaattttttaaaagatttaaaagaaattacagaaataggtaacattgatattttactagcgactcactcacctggtataattcatgatagatgggacttaactgttgaattaaaagatcctcagagatgagagaatttatcacacctgaatttattgctaatcaaattcggatgagacgcagtgcttactcaggaacttttataattgttgaaggttctggaacagtaatgatgttaaaccagaagtattagagaaaattttaagactggcatacgaagaatcctatttccgtaatacacagttgtacaaattgattcaagtctgggaacaaaataaccaaccttatcaagttttattatccacatcttcaaaaaattaacaccttctgccttctgccttctgccttctgccttctgcctcctgcctcctgccccctgcctgataccttatgtataatccgaaacaacaccccaaaccccccactccccagacattaaccctctggtaaactgtcaaatacctgttgaactaactgcttagtcttattttccaaatgttgccaatccacttccccaaactcatctaataaattagtatcaatatcaacatctgtattttctagactgtaattaacaaaacacacttgataacacagatcccacaaatccacattcacttgttgctcttgacgttgcaagcgcaaatggtatcctggatggggcataggcaacaaagcaagattggccttaatatcttccacctgttccggtgtggcagtttccatatcttgcaacaactgtgtcaccatagccttggtttcatcagttgtaccaggtggccaaatcagtacatcatggtaagttcctttccaagaggatgtatccagatgcttacgaatattatcaacaacgcgaataaaagtcggttgcatgaggatttcagcttgctgccatgtggtagagtttgttatcttaggtggcattgttagttaagaaaaatactaaacaaacagtaacaatttgttgtttttattaaaaaactgcaattttagtctaaatcttttctcaagatagcggatctcatgacagaaaatttggagatatttattaccgtttgcaaaattaggtgttaaaactggggagggaatgatgattggcaaactactagaccatagataccaagtcatacgcattttggcaacgggaggatttggtcaaacctatattgctgaagatactaggcggcctggtaatcccatctgcgttgtcaaacaccttaaacctgccagcacagaccaaaaaatctttgaaactgctaaacgtctatttaacagcgaagcagaaactttagaaaaattgggtaatcatgaccaaatacccagactactcgcttattttgacgaaaatcaagaatttttcttagttcaagaatatattgacggacatactctcacagaagaactgatacccggccaaccttggagtcaaaaccaggtgatgcagttgttgttggaagtgttggaaattttagaatttgtccatcaacaaggtgtaattcatcgtgacatcaaaccagataatatcatccgtcgtgctgctgattataaattagttttggtagattttggggcagttaaacaattaaggtcgcctttagtctctattggcgcacaactcaccgctacagttgctataggcactcctggctatatgcccacagaacaaggacaaggtaaaccccgtcctaatagtgatatttattctttgggaattattgctattcaagctttaactggagtacccgctaaccaatttccagaagatcctgatactggtgaaattatttggcagcattttagacctgtcaattatcaattggcggaaattctcagtaaaatggtgcgttatcacttcaaggatcgctaccaaaccgcaacagaagcactacaagcttgtagagagtttgtgaatatgacttctacatcttctgtttattccgaacctcccaaacaagttagctaccatccccccaaacccgcttctaccagcaaactatctcaaatcttttcacagcaaaccgtcgcagttgcacctggtaattctagtcctgttgttcctcaacctgttcttcaacaacaggataacaaacctgatccattacccctgattattggtttattattagctggtggtgcagcagctttggtaacaaatttatatccaaatgtgacaaatatcgctgctaattggactgggaaaagtagcacttcagctacaaattgcctggctatagtcaagcctaattctaatgtccgttctgaacctagtgcgattaattctgataatattttaaagactcttggtgatgctagtgagttcgatgtcactggtaaaagaacaaaacgcggttggatagaattaaaacttaaatctggtcgtttggcttgggcgcactctgatgttattattaataataatgaatggattgcttgtttgcgggatcaaggaatttctattcaaacagtagatgatctgcctttaattgcatctcgacctgttcccaaaccacaaccaaaaccaattgttgttgctactcccaacccagtaaaatctgaaaaatctccaactagtgaggagcagaaaaaaattgtcgaaacggctaggcagaaatttgaatcaggagatttaccgggggcgatcgctcaactcaaaaccattcctcaaaatgcagcttctggtattaaagaaactgtggaaataattaatcaatggcagcaagactgggctaaggctgaagcaatagctaatgaaattaataaagctattgataatggtcaatgggataaagttttagcttatcgagaccaacccgaaaaattacctaatattaaatattggcaaaataaactagaaccattgtttaaacaagcagcagaaaacgctgctaaacaggttcttcctaaccaagaccaaaaacccaatcaaaatcaagcaaatacttccaaaacacccaccactgaggaaaaggaagatagtgctaattaggggttgctgagaaagtctttctgtgagggcataggagtcaggagtcaggagtcaggagtcaggagtcaggaggagatttgaaaatttctttgccatctcttgaaatcccaaaaaatgcacactttttccggtatacccttcaaaacccttgcactaatttctgtgtttatcagcctctaacctttgatatatcaaggttttaggtttattcagcaaaccctaattaatcagatggtaatggaaatgttctttttcccattaccaattacccattaccaattacccattaccaattaatgtaattcgtcgtattccgccgtttccactcttctggtttctgggcgggaagatggtaaaaattcagcccgtctaattgtagctaaaggaggtgtgggtccgtgataggggtgaattacttggacggtacgggtaggacgttgcttaggagagaacagggatagaactccagcgacaaccacaccaccaccaatagtcagagttgccccacctacagcccaaattataggtgaagaccaccagggattttgttcagatggtagtgcagcagcgactttttgctgattttgctgttgagctaactgccactgatgttgagtgaaactttgaacctgaccttggagttgctgattttgtaatctgagttgttcattgtcggttttcaacttctccatctgcatattcagcttttccatttccagacgttggtcggaattgggtgcaatgggttgggggttaggatatactggttgcccatagttagggggatattgcattgaaggctgcatcaattggggcgctacaaccgcagatggcatttgtggagccacagcaaagttaggttgttgtataggggtattcgttcctttgagcaacaggagagccgctaaaccagctacagccactccgccgataaatgccatactttcactcataaaatttacccctcaactaataccaaaccataatttaattgtgactgacacaatattatactctctctcacactcataaatttattgcctagctttaattcacataggactcaacctataagcaaatatatcaggtagttttttttcagcctggtatgtattgttaatattcaagactatatcagtcaaattgtccaccagggaatgataaaaaaactacgctgttatcttttttaatctacttttcccaaatcatcaagagggagttttgattgtttgcttgagagtttggcaaaattgagcgatcgccgagagtccttgttctggtgttccttctgctaaacgcttcaccaccgcactaccaacaatggctgcatccgctccccattctcgcacttgccgcgcttgttcaggatcggaaattccaaaacccacaccaatgggtttatctgtaaaactgcgaatttgtgtgagtaagtcagaaacacgactttccatttgcgatcgcattcccgttaccccggtaacacttaccaaatagataaaaccttgggatgctttggcgatcgcttcaattctctcagcagaactggtaggagctaccaaaagtgttaaatcaagatccatctcactcgctggtttcagtagccctgctgcctcttctaaaggcaaatcaggaactaccaaacctgccacaccagcagccttaatttgccccagaaacttatcaattcctcggtgtaaaattggattgtaataagtaaataaaataattggcgcttgcaaactgggagtagtagcttgtaacatttccagcacttgatccaaagtagtacccttttgtaaagcgcgggtagcagcagcttgaatcaccggaccatctgccagtggatcagaatagggaacacccagttcaataatatccgcaccagaacgatctagaacctgcaaagcctgagcagtagtttctaaatcaggatcaccagcagtaataaacggaatcagagcgcactcgtgattccgtcttaaagtttcaaaacaacgagaaattgcagtcatttgttagtggtcagtggtcagtggtcagttatcaggtaattggtcattggttattggtaattggtaattcaatgaaaggattttggatttttgatttttgattgtttttgtcaattccaatctaaaatctaaaatctaaaatctaaaattttcttacccagtcaccagtccccaatccccagtcgctaatcacctgattcaatttcagcttgtaatttcgccaattcttcgggagagagttcatctagtcgcttttctaagaacgctttttcatactcttcccgttgttgatggtaggtcatttttttactccctgcacggaaaagatatgtggctaaccaacctatcaaacccacaaccagtaaagcttgactccaaattccagcgtcttggacatctaaaccgactaactgtaatcctacataagccagtccaccagccaaaaaaacgcccaaagtaataccgattgcatcaatacgtcgcatgagagttatgacctaccaatatactaattgaacaaattaaacaatttgtctgcgccggggtcgaacattggcaattggggagagcagcaacagacccggaaagaagaaaaacaccaaaaagtacatgaatccacgttctacagaactggcagaataccaacgcagcttgagataaaacatcacaatcattggtactaccagaagataagctcccgctaaagctaaatacagtagtgctacaaccataattctttgtttagatttgagaataccatttggtgcatctactacccatgatatgcccaacctgtcaactaaggaaagtattggtgattggggactggtgattggggactggtgactgggttattaacttccctttcttcccctacctgccctatgtccctatctcccctgaacctgcctattttcaagagttgtagctgacaatgaaaaaaaaattgccaaatacttggcaaaattataaaaaccaggtaagattgtgtgacaatagaaatcggctgttaaatgcaagtgtatcaaacaccgtagcttgtgaaaaatccaacttaaaaaaaagttaaaaaatttttttcaaactacttgcacaaaaaacgcagttaatggtaggattatcaagggtgttttgagatacaaaaacaaaaaaccctaaacaaaaaaccctttgggagtgtggcggaatggtagacgctacggacttagaaaactgagccttgatagagaaatctttcaagtggaagctctcaaattcagggaaacctaaatctgtaatctaagtgaacagatatggcaatcctgagccaagcccagaacctttagagttgagaattgattttggggttaaatccaaaactcaaatttcaaagttaaaattccgggaaggtgcagagactcgacgggagctaccctaacgttaagacgagggtaaagggagagtccaattctcaaaacctgtaaggaagtagcgaaagctgcgagagaatgaaaatccgttgaccttaaacggtcgtgggggttcaagtccccccactcccatttttgataaataaagagcttgtcctaagttgacaatttactagacaaacctatacaagtacatacaaaactacaagtatttgacgtatacatggaataagttgactaaaaaattaggcaaaatgtgtcagaattaaataataaagtatagtgttgacatcagcaaatgcttttatccatcaaaac

SEQ ID NO: 37 - DNA, 49909 bp, Sphaerospermopsis sp. LEGE 00249
  LEGE00249_52
aaacgctgcgattaatttaaaacaagaagcggtcagattgatcgtgttagcctgtggtcagtgagcgaagtcgaactgtggactagatagtgccgacactgctagggtgaaacaggaagaaaaagccgacttttgttagcattagttagcttttttgtatcggcagaatcaaccacaaagcaacgaaggacacgaaggaaagagggtttgagagatattttgcgtaagtcctaatagttaagcgtcaaacctttgctatttcagatgtgtcacctgtggtttgcagcaatgcgggtacggcttcttcatcaaatatggctaagtcgaaccagaaagtagtacctacaccaacttcactgactaaatgtacttgactatgatgtctttccatgatgtttctgacaattgataaacctaaacctgtaccttccagggtgtgaactcgattttccacccggaagaagcggtcaaatattgcctgttggtcttctggagcgatacctatacctgtatcactaatttcaatcctgactaggggatgcttttgttctgatatgggaggctttagctggtaggcgcgaatggctacttgaccacctgcgggagtgaatttgagcgcattaccgattaaattaccaaaaacttgcagtaataaatcataattacccattactagcggtaaattcggggctacttcctgaaccagttcaattcctttatctttggcgttgagttggtaagtacgtaaggtctgctctaatgcttgtgctaaatcaacaccatcaaagttgtaagtgcgaccggattctagttttgataaatctaatacatcattaactaagcgggtaagtctgtcggtttcatgatttacagttgcgagaaattcgcggcggtcttctgctcctaagtcttcaccgtagtcatggagtgtttctatataggtcttgatattaaataatggtgtgcgtagttcgtgagaaatattgctgataaattgacttttggcttcattcagttctacttcacgggtgatatcttgcactgtaatggcgatacctttaatactttctcgttgcaggttgaggactgtggttaaaagaatacggatagtgcgtttggtgggttggttgagggggatgcggaactcagcactttcacattcaccggctgccatttcgtacaaggtgcgggtaatttccatttgtacgctttggggtaagttatgcagtacattcttacctaccacatcaaccccttcccaggcaaaaatgcgtcgtgctgtggggttgactaaaattacctgcatattgttgtcaattaatactgcaccatcggcaatggtggaaaccaaggtttctaatttggctttttcggcggttaattcttctatgttttgttcttcgtagcgttctagacgctctgccatttcattaaagctgaaaataagctctcctagttcccctcccagtggtaggtcaattcgctgtttaaaattcccggcggcaatttgtttaacgcctactaatagttctttaattggttttgtaatggttaaagcgttaattactcctgctaaaataaccatcacccaaattgtgataaatacagcgatggtgacatcacgggtaaagttagaggaaatgactactgtggggttggggttgatgccaatggccaacacgcctaaatatttttgatcctctattaaaggaataaatacatctgtgactaaaccatctggggtgttatgttggcgtaccattggctggtcatcgtcaccaggataatcttctggtagttgtatttttcgtttgatggtgagggagttttctacttcgggttcccaaaaaggaatgccaaaaaagattttcccggtttcatcagagtaaagcatatatctgacgctagatgtactgctgtagaaacgttgggaaaattgggctacctctgtgagattgttttccgcgatgagtggggcaacgttggaagctagtagtagtcccaggtcacgaccaaagcgggtatcgttaagacgtgcatcttgttgaatggtgttgactgcccaaaaagttaggccactcatgaataaggaaacaactagggtggcgactgctagaagtttggtttggagggtaaattcataccaccaatggctaatgacgttgcggattgttgtgaaaaaagccagcatcttaaatatatttatatatataggactcctatttgatttttgaacagaactcagtacatggttcggcttcgctcaccataaatactgacagccttctttcctgttccctgttccctgttccctgcctccacgaaaaattcatgaatcaaatcggatcactatagctgttagtagttgtgtgttttctgtctcaaccatttaaaaattaacagttaattcaaaaaaggtgttagggaggaattgggaagatggaatggtggggtggtggaaaacctactaacctgctaaattacagtctattttatctgaatgaggtacacaaaggcgggcaggatgcccaccccacaagatttattatattaaaatgttaatatgtgtacttcatttacctgcaaagtgctgtatcactttgttttcaagacacaatgaccgatatctcgacggtagtacattcctgaaaattgaatgtgtttgattccagtgtaagcttgggcgatcgcctgtgggaaattttctcctagtccagtaatatttaagactctaccaccgtctgtaacgatttgctggtctgaattcagctttgtgccggcatgaaatactattgcacctactgtttctgctgcttcaataccagtgatcacttggcctgtctcataatctccaggataaccacctgaagcggcaactactgtagctgctgcacctggtttccaagttagaggtggcatttctcctaaactctgctggatacaagccaagattaaatcttctaagggtgtttctaacaaaggtaaaattacttgtgtttctggatcaccgaagcgacagttaaattctaaaacgctaaagtcgccattgtctgcaaccattaaaccagcgtacaaaactccccggtagtcaatacctctattttttaaagctgtgatggttctttctaaaacttctgtttgcacacgcgccattaattcaggtgtggctatgggtgtaggcgtatacactcccatacctccagtattttctccggtgtctccttccccaatgcgtttatgatcttgagcaggtaacaaggggcgaattgttaacccgtctgttaatgctaaaaccgaaacttcttgacctaataagcattcttcaatgacaacaaaattacctgcactgccaaactgtccttgaaaaatagcttcaatggcggtttctgcttgttcaacggtttgggctactatgacacctttaccagctgctaaaccatcggctttaataacaattggtactccctctgcttgtacataagcttttgctgctgctgctgcttgaaaaactgccgctttagctgtgggaactcctgcttcttgcattaacgctttagcccaggctttactggcttcaatttgcgctccagcttggtttggaccaaataccattagtcctttagtttgcagatagtctgtaataccatttgctaaaggtacttctggaccgactactaccagagaaatgcccttttctagagcaaatttgcctatgccttcaaagtcatttaccgctaaaggcaagttttgacaacgttccattgttgcagtaccgccatttccgggtacacaaacaacttgctcaattttgtctgattgtagcagtttccacgctagagcgtgttcacgtcccccattaccgacaactaaaactttcacttatttcctcgtgcgttcctgtcaaagtgcgaatgccacaaagttactcgcagattaattttttcactaattatcctacataatcaaggtctgaacgggcaaggggaaactaggaacacttaatttagtaagtcaaattcatcacgatttactaaaattgtcaacaaactataaagttttgtggtttttagtaaaaagaaaatgtctagttaaaaaattagcacaacttagcataacttattaacagttagaatgacgttgataaaaaaatcataaccatttcaaaacatcgggaacatgactaaaattatcgttactggggctgctgggtttataggttctcacctggtcaataccttattgcaacagggagaagaagtaattggcattgatgaatttaatgattattatgatccacagttaaagcgaaaaaatattgccacctttgaaaattcaccgaattttactttagttgaaggggatattcaatttttagatttgccaaaactttttcaagatgtggaaatagtatatcatcaggcggcacaagctggggtgagaaattcctggggtcagggttttcgggcttatacggaacggaatattaacactacacaggttttgttggaagctgctaaggatgcttcccggttgaaaaggttagtatttgcctcaacatccagtgtatatggtgatgcggaaactttaccaactcatgaggaaattgcacctaaaccggtttcaccctatggtatcactaagttagctgctgaaaggttgtgtggactatatcataaaaattttggtgtgccttttgtttctttgcggtattttacggtttatggtccaagacaaagaccagatatggcatttcataagttttttaaaggggttttgcaggatgaggctattcctgtctatggtgatggacagcaaacgcgagattttacatttgtcagtgatgcggttgctgctaacttagctgctgctactgcaccagaagcggtgggagaaatttttaacattggtggtggtagtagggtggttttaactgaagttttggatacgatggaagaaattgttggtaagcctcttaaacgcaatcatattgaaaaggctatgggtgatgcgcgtcatactgctgctgatgtttctaaggcgcgaaaaattcttggttatcggccacaggtttctttaaaggaaggtttgcagcaggaatgggagtgggttaagtcgttgtatttgtagttgttgatccccccaaccacccttaaaaacgggggcttttaatttttaatttttaatttttaatttttaattctcaatttttaattttcattattcccattgttgaaatttctcgatgctattgcgaagtaaagaagtaatttgagtgcgtcgggtttcaaagttggctgctatataaattaaaagaatgcctactaataagccaattatccattttaagaaggagtaactgaggctgaaaattactaattgataaatgctggtaatgataaacgttgctgtaccaacatacaggaaggcacgtatttttaaagctagtccggcaaagatagcaataaggctaaaaataccgggtatgtaaggtaaattttgataaaataatattgtccatccacaaattaagctactaccaattgttctgattaaatgacgtattggtttaaattcttgtggttttaattgtgggtctatttgggcaatatataatattgataagctgatgggtgtggtataccataagctatctgtgaagtttaattgaataaaccatttaaataatgcccaattaattaaaattacactaatgtaggtaaagcgaatttgtctggttgttgtagacagaaagatatagtataaagcagcaataattaaggtcaggggataaatttgctgttgggtaattccgatgatgattaatggtagaatgtatgatgtacgttgccacggtgtttttgaccaacctaatttttcccaaggtgtaatgtagaggaagtaggcaaagatgcaagctaaagcaccgttccaaggtgttaactgttgagttaaaaagctacctatgggtaaattttgtagataaatacctgttatccctgctgttaataaacctagataaacccaaatttcatctttactgatattactaacagtttgtacaggttgatggaaattatttcttcttccttgccatattccatagcgggttaaaaatagtcctgttcctatagctggataaaggttaatttctatggaaactgtgacagcagctaataataaaatgctactccaaaaccaatgtaaatgggcaatattttttaattctcctggtgtgagacaaaaataatttattaaccaaggggaaaggatacggtaagcatacatgatgctagttcctaacgctgacatagctattaaaccatctcttaatgcacctcctgtagcttcagacatttgataaaatagcagttcataagcagaaattgatatcccaataatgccaaaataaagtaatggtttaaattcttctcttctccttcctacaccaactaaaattaaggctattcctaaactatataaacctgtccagtcggtaaaggtattgaaccttaataaaacactaaatgcaccataaatgatgggtaaaatatggaaactttgaggtatagtttgatattgtgcttgatattttctgcgccacaattcaccgaatagttgagttattaaacccaatgcaatattagcaattcctattttaataattgatggttcaccaaaacctaaaatttccgccactaataattctaaacaccaaccaatgctataaaatgcccagtttgttaattgttgataagtacgataaataatggcagttaaagttattgatgtagccaataaatagaaaatttcggcattgctatttcctgtataaacaaggaatgaatgtaaggtaattcctattaattctatggtagatagtgcaatagcccatttatcacttgctgctgcgtaaataagggttaattccgtattttttcttaaaagtatggtatgtcctaaccataaactcaagatagcaaaactaccaactaaaaaccaaactgataaagctaaatttggtatattccacaataatgcagcaatgaaactcagtccaaaaccaatggttaaagcggcagtttcttgttttcttaaataacgggtattgacaaacatcacacctacacccacacccaaacctattaacctagtttctggggaaggtaaagttaaaaattgggctgctaggacagttaacacacttaaaaaagtattaaaagtgcgatgctgttcattatgagtacaagtagctaaacctgtaagtgctaaaggtgtaattaaccaaatagctccccaactgttataagataatgattggacatttacaaacaacaaggtaaaactcaaggtagcaagtgctaaaccaatataccaagcactacgtttccaaattcctgcaccgagactaaatacccactccgcaaccatgacagttaataaaattgctgcccaaatttctttactcaaatttggtgataaccaattgatagcagaaaaaacagtcaacaaacctgtaacatgagttaaatacactaaatggggaagagacgcatagcgtttagtaacgatagctaaagtaatggcagacaataaaagattgactgttaataaggtagaatttagtaaagcgaacattgttaagcaaacccctaataatagggttagctgtttaccaaaaactgctaattcttctttttgttcatgatgcaatttttctgtgagaattaacatcaatattaaataagggaataaagcaatactcaataatgctaaaggttgattttgagaattagtcagataagttgctgtattaatgataaattgctgtaatgtttctggtactatccgccaacttaaccaggttgtttgtaaaccaatcaagaaaatagctgtgaaatcaatttttgagttatgaatttgtaaacgctgactaaaaacccataaacttaaaccactgataattattgcttgttgtggttgagtgaacactgaaactaaccaacctaaaaataataaaattccccctattttttgccaaatagcatcaacagagggggtagatttaatatttttagctgataacaaaaccgctaacaaaccacaaatactaattgctaaacctaactgcgtgacattaacactagcaacaaaaatggctcgaaataataatcctaataaaccataaataatgactacaaaataaattcctactccccagctatcatcctgtgtgtcgatattttctcttggttgtttgagtttttgataaactgtaattaaggttgtacatactattgctatataaatagcaattaggggaaaacctgatattttccaaccccaatgtaaataacttaaactgagaatattcaaaaatggtaatttgccattggggaaattattaataattgtgcgatttttagcaagtaaaactgtaatggttgatagaaataaagaagcaatagctaatactaaccagttaataggattattccataaattaaagctatccattgcccaaaaattaacaggcactaataaccaagtgacaattaataatgtctgtgctgttaattttaaattatcttgtttacctgcccaaaaagtaaaaccaccaaatgttaaagtataagctaataaaactccatattgtccaatagcgggaaatttttcccattgacttgctgctaaaacaccagaggataaaacaactaaaaacactcctaaaaataataaccatctcacacttaattcttcacctaatgattgcagcatcgcagtgataaaattaggttgaggtggtgtttgtggttttggggttgaggtggcaattaatggttttgatgtggtagtctttgtcagtactgcttgtgtttgatattctaattgtggttgtaattgtggttgtaattgtggttgtaaaactacagcacaaactagataagtttgacatatttgcctaactttggcatcagatattaaacctagacgcaaccaaatatctaaaccttctaataactgaggatgggaactaggtattctcagttcaactgttagtagaggatcacgggatgatgacataagtttcaaccgtatcagtagatacttatattttgattgtattgttacaatattttggtgtttgttgtgccagttctcagaatatcttacgcaaagccgcaaaaacacaaagaaaagttaagttttatcgctaaaagtacaaggtatgttgtagccatttgctaaaactgtcactttagaggtttaattattgctgctggagtaagttctgtgtgtgttttgtgtgggggatggttaatgtttatatccttcccctctaaaaataaaaattaatctgtaccagctttctgttcttgatacaattgtttaaacaaagcttgttgttttttatgatctacaatgggtgcaggataaccaactgcacgacgttctaagggtgtaatatttccacttattaaatattctgtatctacagattccaattctctcacccattgtctgatatattcaccatcagcatcaaatttctgtgcttgactagctgggttaaaaattcttaacggtttggggtccattccacttgacgcactccattgccaaccaccattattagcagataagtcaccgtcaatgagtttctgcataaaatatttttctccccattgggggttaataattaaatctttggttaaaaaactggctactatcattctacatctattgtgcatccagcctgtttcatttaattgtcgcatggctgcatcaactatgggataacctgtttttccttcacaccaagcttgaaaatgtttttcgttatttcgccaaggaaagtttttaaaaacttctctatatgcaccttcagctaattctggaaaatggtacatggcgtgttgataaaattcccgccaagctaattctttttgccaagcaataatattattagtgaattcttcactgttactatttgctaataattctgcggttttatgccaaatttttcttactcctatcacaccaaattttaaggctggacttaataaagatgtaccttcaatagcaggataatttcttttttgatcatattcattaatcacaaacttggtaaatttgtctaattttttatgtgctgctgtttctcctggtgcaattattaattccctatcccaaataaaacctaaatctttcgctgatagtaaattaattgtgcctgtttttttagctatttcctgttctgcatctgttaaattttcgcagttttctaaagttgcaactgggttatttttaggtttgctactccaatttttccagaagggagtataaactgtgtaaggagtttttgaaccactaaaaatctcatcgggtgaatgtaataattgatcccaatttttctctagagtctgaatacttttttctttaagtgctaaaattacatttttatcccgtgtttgtgcatagggttctacatcccaattccaaaaaactgcttttgctttcaaagcttcagctaatttgggaatggctgttactggattatcttgtaaaattaataactgactacctgcttgaagatatcgttgttgcaatgcttgtaaacaaccaatcatgtaactaactctagcagatgcaacatcatcctgttgtaaaataccaggatctaaacaaaaaacacctactacctttgcagtttgttttctagctgctgctagtcctgtattatcggaaatacgtaagtctcgacgatgccaaaataaaatcaggtcagacatttgttgacaatggttacaatatagtttatttgtactatgatactagtaatagtattatttagcatcatgcaagtgattaatttttatgtaaggactgataataaagcagagttttcacgtcattcttgataatttataaaaaaacttactgttatggatttctgctacaaataaatattctgactcctgactcctgtacgggcgaagcattcggaaaatagccttttcataaaattgataatttgtcgaccgaatgcttcgcccctacgactctttgaaccctgaactcctgattttataaagtatctttaaaaacacctaattatcgatcggcaatagtggctatttgagacaattttcagtaaactgttgttaatagagaatttagtattttatcatggcaattttattactggaagacggaacaacggaaagtgatttaagtgcgatcgctcatgagttagaacctctaggtattaaactcagacattatgatccggggacatctttactttttccagaactgatggaacaagaaaccgttacagatgtcgaaaagcatcatattgtaggacttcataacagcgtgtttgagtttcttcagcaagaaaatggttatttgtggagtgatttactcaatatacatcctggttcgccaaatttggaaacttggatggcaacttatggaagttatcacacccataatgctgcggaagctatttatttgttagcaggagaaataatttatggttttgtgaaacctgatcgcactcaagtacaactgttaattacatcacaagactatttacacattcccgccggagtagaacattggtgtagtttctcagcatctttacattttaaggtaatacgctatttcacaactgtcgagggttggatgccaatttatacaggtactcatcaacagtttaaaatttagcttttgagaaagtgcatctaccaataatctactttcggcgagtctgggtaaaatagattcgctttaattttttaattttctgggaaaaaccgattatttactacaggaaagttaaagcttgtccgcgaatttccgtatttacctttccttgattataaacaatttcaccaccgacaatagttgtcacaggccaccctgtcaaattccaaccttcaaaggaattccaaccacatttacttaaaacttcttcccgctttactggtttgtaggtatttaaatctactaaaactaaatccgcatcgtatccaggggtaatttctcccttgttgggaataccataagcggtagctactgctttagacatccagttcacaacttgggaaacagtacattttccagccattgctgaggttaacattaaaggtagagaggtttccacacctggcataccggaaggagtattggggtaagtttgcgccttttcttctaaagtatgtggtgcgtggtcagtagcgataaaatcaattacaccatctcgtaaagcttgccaaagaacttcattatcatggggcgatcgcaacggtgggttcatctgtgctaatgtgccaatagtttgataagcactggtatttaataacaaatgttgtggagtcacttccgctgtcacccaactcggtttatcttcacgcagtaactccgcttcttcagcagttgacatatgtagaatatgtaaccgtcgttgatatttcttagaaagcttcaatgctaattgtgtcgcattcaaagcagcttgattatcttgaatttgggaatgaatagccggatcatgaataccagcaaactcttgacgacgttggttaattctcgcttgatcctctgcatgaacagcaattaaacgactaccatgagcaaaaatctgctctagtacagtttcctggtcaaccagcaattgaccgtgcatagaccccataaaaatcttaatacccggagtgggttgggcagaaactaattctgttaaattatcgcccgttgccccaataaaaaagccataattaactaagcacttattggcagccctttgtagtttatcatctaaggctgactggctggttgtcaaaggtcttgtattcggcatttccagaaaagaggtgacaccgcctctagcacaagcacaactagcagtaaacaagtcctccttgtattccaaaccgggttcgcggaaatgtacttgcggatcaatgactcccggcaacaaagttaaaccttgtgcgtctatttcttgagttggtgtggcatgagagatttctgacgctacctcgactattttaccgccttgggtcagcacatctccaatcataaactcaccattcggtaaaatcacgcgtgcttggcgaatcagtaaacttttagcagatgacataaatttaatcagttatcagttcacagttaacagttatcagttttatcttctcccatatgttaaaagaaaattaatttctactcagtcacaaacttctagtaacccatatcaacatctattaggaaaaatcagttgtctagttaaaatattaaaataacaataacatcacagtctctctcatcagttcagtgcttgtctattaccctaaatttcagtaatttcatgcaaaatcaagtgtctgataaaaactctagccaacaacctgataattcctggatcctcgagctaggcaaaactgttatattgagcgtctttctagctttggggattcgtaccctagtcgctgaagcgcgttggattcctacagggtcaatggaaccgacgctgcacggtgtacaagaccaatggaaggctgataagattattgtcgataaggtgacatataaatttgctaacccacagcgaggggatatagttgtattttcacccacagatgaactcaaaagagaacaataccatgatgcctttattaaacgcattataggtttaccaggagaaaaaatagaacttaaagacggcaaagtatatattaataaaaaatatctgccagaagaacaatatttatttacctcatcccgtactgttgtggatgtttgtgcatcaggatcgcaacctcctttcttagcgaaaccgcaaaccataccaactgattcatacttagtgttaggtgacaatcgtggtagtagttatgatggacgctgttggggtttagtaccacgggaaaatattattggtcgtgctgtgattcgtttttggcctctgaataaaattggcggtcttgataagtctcctttgtatccatctcaaaattaagaaggcaggaggcaggaggcatgaggcaaatatttctcccctactcccctactccccatctgctgatcaaaaaattggattttttcctgatcgggggctgcaattttgatggcaaaaaaagcataatagaagggtgaccaaactcttagcccctttacaatccctaaaacaaggtaactggtttaagctgatttgtggagccagtttccaacatctaccggcggtcagaagtttaactttagcctatactttggcgggtgctgactgcatagatgtggctgctgatccggctgtaattaatgccgctcaggaagctttacttgttgctaaaactcttgttaaagatgctcaagcgagaggctttaatttttcaggccatttacccttgttaatggtcagccttaacgatggagaagatccccattttagaaaagcccaatttaatcctatttattgtccaccagattgccctagaccctgtgaaaagatttgtccagcccaagctatagtttttaacaatcaaaaagatagcttttcaggaattattgccgaaaaatgttatggctgtgggcgttgcattccggtttgtccttatgagataattgatacagcatcatatctgtcaacgccgggagcgattgcaccattgatcatgtcaacgggaatagatgccatagaaattcatacaaaagtagggcgtttggcagagtttcagcgtttgtgggaggcgatcgctccttgggcagatcaattaaagttattagctatcagttgcaatgatggtgatggtttaattgattacctacaaacaatttatgatctaatttcaccccgtacccaaaccttgatttggcaaacagacgggcgctctatgagtggtgatatcggtaatggtactaccatagcagccataaaattaggacaaaaagttttggcagcaaatctaccgggatatgtgcagttagctgggggtactaatagctacacagttcctaaattaaaggctatgggactacttcaggaggaaacggagcagggagcagggagcaagggggaaaacttttctcctctgccccctgcctttattgctggtgtagcctatggtagctatgctcgtgtgttgctgtcatcagttattgacaagttggaaaatcaggaggtgagttccactggtgttaaggcaagtctgcgccttgaggatgaaccggaattactttggcaagctgtaaaacttgctgattctctcgtttctcagattaagtcacagtaagagcgttaaattgctcattcgttatctctaaaaacgtcaccaccatagaaagcatgacgattacagaagacctgcaaaagttactggacattttaccccaagacctgcaacagcaactagataaccatcctaaaagagatcatttagttgaagtggttttggatctaggtcgtcgcccagaagctcgctttcctcatgctgctgagtatctgagcgaatcccctgtcactcaagcacaaatagatgattgtattcaacgagtcggaacctttggtggagataatcgggcgggtattgagcaaactttacatcggatcagtgctatccgcaaccgcaatggtaaaattattggcttgacttgtcgtgtgggtcgggcggtatttggtactattggcatgatccgcgatttggtagaaactggtaaatcaattctcatgcttggtcgtcccggtgtaggtaaaactactgctttgcgggaaattgcccgtgtgttggcagatgaattgaataaacgagtggtgataattgacacctcaaatgaaattgccggggatggtgatgttgctcacccagctattggtcgcgctcggcggatgcaggtagcaaaaccagaattacagcatcaggtgatgattgaggcagtggaaaaccatatgccagaagtgattgtcattgatgaaattggtacagaattggaagctttagctgcccgtacaattgcggagagaggtgtacaattagtgggtactgcccacggaaaccaaattgaaaacttgatcaaaaaccccactctttctgatttggtagggggtattcaagcggtgacgctaggagatgacgaagcgagaagacgcggttcacaaaaaacggtgttggaacgcaaagcgcctcccacctttgaaattgctgtggaaatgttggagagacaacgctgggtagtacacgaaagcgtgtccgataccgttgatactctattaagaggtcgtcaagctaacccacaaacgcgcactgtggacgacaagggtaaggtgtctattactagacagttatctgtggttaatggtcgcggtggtcatttagctagtgaggatgaatcttttcccgcagttaaacaagttaatggctggcgtgcttctggtcaaatggtagctttacctcctttgtctgtggaaagggaacgggtaacgggacgcagcgagtttgaccgcttgttagatgagtctttgaattatggtgaaagtattgatttcggtcatactaaatcaccaggtcccaatggggaagatttgcctttgcacgtttacccctatggagtgagtcgtcaccagttggaacaggtgattggggtgttaagtttgcctgtggtcttgacaaaagacatagatagtgctgatgcgattctggcgttgcgatcgcacgttaaaaaccacgcaaagttaaggcagatggctaaggcgcgtcatgtccctattcatgtgattaagtccagcactattccccagattactcgcggtttgcggcggttgttgaatattgacgagccggaaattaccgatgatcaggagttacaattgtttttacacagtggtagtgatgacgagatggacgctttggaagaagcgagattagctgttgagcaaatcgttattcctaaaggtcagccagtggagttgttaccccgttctgctcaggtgcggaaaatgcagcatgaattggtggaacattatcggctcaagtctcatagttttggtgaagaaccaaatcgcaggttaaggatttatccggcttaacctctcccccaaccccctctcctacaaggagagggggctaataatgacatcaaatcatccaaaatcagaaaatcaaagatttacgagtagcaaataaatgaatcatcaaactacctttaaagaaattgcttctcaagtgcaattatttcagagtatagaacagaaagaaagatttatatttgtgcttggtgctttaacatctcggttaattagtttacataaagcagccgaaattatggaaatggatacagaaatatttttgaaaattttagaattaatgggaatagatttttcatatcttaccgttgacgatattgctatagaaaaaaactggtaaagatcatgaaaatagtttttaactcttctcctttgatttttttatctaggttagattttcttgatttatttctgactatggaagctgaatttttattaccagaaagtgttaaagaagaaatcagtgctaaacaagatcaatcatccatacatacagaagtgttgaatgttaagattttgaggattttgtccaagttgtgcattggtattggtgataccaaatttgagcaattaatgactctattctcaatagacaatggattttacctgggtaaaacgaaaagattgtaaagttttattgcaggattcaacacttgtgccatacatattaataaactaatcagcgaaaataaattaacagtacaaaaagtacaattagtttctctagctaatagtttaaatgacttcttaggaataggagagtctgaagctattgctttaggggtagaattacaaccagattatattattttagatgactttgctgctagaaaagaagcaataagattaggattaaacgttaaaggaactttagcaataattcgtaaattacaactagatggtaagattaatatttcggatttagatatattgtaccaaaaaatcagggatgttaattttaggatcaagcgagaaatttttgatagtatttttgagtattgatacatgaatgatgctcaatctttacagtaatttttcacatattcccgaaaaacaggagacaatgaaaacatgactttatcttctttaattttcaccactaaataccgttgttgtaaagattgtaatccattattaaaatcaacagaagataaatttaatttttgtgctaacctttgtcttaattcttctctggaaatcggtttttcaaatttactcagttgtaatactatttgttgttctatcggtgataaacggttaaatttatcttgaaaataagactgcatttgttgggtaatatgtaatatattctctgctaaaaaatcggcaacttcaccatcataatttttggtgattaagacggtaatagtttttaaaaacatcaaattaccttggtataaggtaataagatttaaccaactatcctgatttgttaatcctgtattttggagtatttcaggatgatataaacctgagagttctaaagatttaatgggatataattctggatctaaagattccatttctggacattgttcttgactaattacaataatattactttgatgttgggtttctgtaacaagtttgaataaggtttgataatcttgatattctggttgatattttcctgcaagttcaccaggtgtaaagagattttggatatcatcaaggatgattaaacatttgttgttggtgagaatatcaagtagttgtttgattttatcatctaaggtttctttgggttgtttttgacaggtgttaaataagtcattaaggagttgggttaatggtttagggtatttgagggttttccagataatgatttcaaatttatcgaggtttaaatctatgaatctttttgtgagggtggttttacctattcctgatgttcctaagatgcaggttaagcgggtattttggtttagtatccattgtgtgagggtttgcagttcggtttctcggttgtgaaatttgatgatttggggtgatagagtgagatcgtggtaagatgatttatgttgattatttatattagtttcttgattttgtttattaggattatttaaggtttgcggataataaaaactattattattaccatttatattataaatattagaactttcaaatgatttaatatatcccctttctaatgtagaacgaaaattagtttttttaatatcttcattcaatgctttagataaaagttgccataattccgcacctacatcacctatatgatttttagtaacattgtgttcttgtgcaatattatcataggtttgtctttcccatgttcctgcaatgacagcagtttgaatatcatctagatgctttccagttttatcaaagactatctgatcaacaaattttacaacttcgtttacagtcataaaagctatacatggtatggtttttaaccattatagctaaatgtgatcccattttttccgatcttttccggtttttttcttagtattttgtaatacaagaacagtataaatccgtatctacaacaatgaaaactatagtataaagaattaatctacacataaacaacaaatacaatgactacgaaagctagacaaggtttaccacgttttattactacagaagctattgcaccaaataatgatgctggttatcaaaaagtttgggatgcagtcagagcagcattttcttctagtcgtgagtctagtattgggtattggcgttatcctctttttctgcaagttggcgatcgccgcaaagaaccagatatacttattgttgatcaacaatggggcattattataatagaagtttgtcctgtaaatattgaacaaattacatcagttaatgataactatatccagtttataaataatactctacaacaaaattattctctggaaaatatttctaaatatgccgcagtgttgcgtaaatattgtgatcaagaacctattaaaactccagaatcagatattcaacaaaaaatcattggacgtactttaattgcttttcccaatattagtacaaaacaatggcaagaaaaaggatggacgggaacagaagagggtacaccatttatatttaataatcaactgggtgaagttggtttaaaaaaccgtatagaaaaatctcaggcggcgattacaggcgaatcattaaatgatagtcaatataaatcccttttaagtgttataagtggaacatctattctgcgtaagtctttagaaagaatagaatctgctgataatcaaagtctttacaatatattagcagaagcacaaaaactgatgtatgaatgggatgttaaacaggaatatattggtaaaactattccaccaggtccacaacgagtaagaggaattgctggttcaggaaaaactgttctttttagtcagaaagcagtgattatgcacctgaaacatcctgaatggaaaattgcatttgtcttctttactcgtagtttatatgaccaaattgaaaaattatttgagttatggatagaacattttactaatggagaaatcgaatataacaatttccctaattccaatttaagagttcttcatgcttggggtgcaaacaatagagatggtttatatggtgaaatttgtagaatcgaaaggataagaaagttaaatccacctgatacaggagaagaagttcctaataatgcattagcctatggttgtcgaaactttttgcagcaaaagccaaaattcaaccctatttttgatgctttagtgattgatgaaggacaggatttaatgacggaagatgatctaaaatttacagcagaagatggtgaagagaaacagtcaatttattggttagcatatcaatcattaaaatctgtgactaaggagcaacctgagcaaaaacgtttgatttgggcttatgatgaggcgcagaccatacattctacaggagcagttgcaccaacagcaagcaaagtcttgggtgatgaactgagtaatgtcttaggtggtagtcgtaaaggtggtagtcgtgaaggtggtatttatccggggggtattcgtaaagctcatgagatggaacgttgctaccgtactcctggagaaatcttaactgctgcttatgcttttggtactggtttattaagaacagaaggagtgctaaaacccgaacgtatgcagaaacaagatttacattctattgggtttgaagtggtagaaggtaaaatcagcagtaatgctaaaattactattaccagacctccagaaaattcacctaatccagttcctcgcatctctaatcatccagtgattaaatttgaaaactatgattctcgtcaagatgagcttttcgcattagtagagaaaattaaatataatttacaagaagatcaattaagtcctagtcgcaacatcttagtaattgctttgggttatactactccacctttttataatggcaataaattagaaagagaaatagctaattttttaatagattatggaattgatatttatattcctagcgcattagcattaaatgatattaatcccaaatggcctaataataatcctgatttattctggtttgatggtggtgtaaccgtttctagaattgatagaactaagggaaatgaagcagatatggtttatgtagttgggttagataacattgctaaaaatgaaagcgatacaaaactacgaaatcaattatttgtagctttaacgcgttctcgtggttgggtgaatattagtggtattggtaattatcctttctatgaagaagtaaataaagtaattgcacaaggtaatacttttactttcactttgaaaggagtcaaactacctgaagatgctaatgatgatttaactgaagaagatgaacaaaatctttaatattcagtagtaggttgggttgaggaaacgaaacccaacacatatatcaatcttgaataaactcacctatttaaaaatacttaatagtgtggtgtcaacttaatcaaaaaatggctgatctgttagcttccacccccgcccagaaatgaatttccgggctaataaccaaagtaaactaaagtttactagaagattttttgtgtatttagtcatctttagatgacttttgctattagactgggaattcattcccagtcgggttatggttttgattttaaattgacaccaattagcattgctaaacccctacaaaaatatcagtaatatcagtttttgtaaataaattgcatatgtaaataattcgatatttttaatttattaatgatgcgcgatttagtgatactttggaaatgagttagcggtaactccctgaagcgatcgctatactacccataatttgccttacctccaccaaaatcaaataattaaaacatcataaaaatcctcatcaatacatcagtatcatatacaattaaccagcaaataaaaaactaaaaaacctaaacatgaacccaacaacagcaaattatgatcaagcatggaaaggagcaatagaaaaatactttccagaatttatcagcttcttttatccccaaatttatcagcaaatagactggagtaaaacaccaatttccctagacaaagaactagaacaaattacagctacctctaacacagaaaaacgctatgctgataaattatatcaagtgtggttactagataacacagaaatttggatattaattcacatcgaagtacaaagtcaatacgatgaagaattttcccaaaggatgtatatctataaataccgctcctttgacttatataggacttacgcaaaatatctctcaaaacctcttatcttcgtgtccttcgtgtccttcgtggttcattcttccgtaacttctgcgtaagtcctgttataccataaaccagtagttagtttagccatattaggagatgaaagcaaaacatggcgacctaattgttatcaatacggtttaggtaatagtgaggttgtgtgtaagtttgatacagtcaaactcatagattacaaatgggaagaactagagcaaagcagcaatctctttgctatattagtaatggcacatttaaaaaccaaaactactactaacaaactcgcagatagggagcagtggaaatggcaattaattagaagtttatatgagcgaggtttaagcagatatgacattgaaaacctctttagatttattgacaaaatgatgtcattaactcaggaattacaacagaaattgctcaccaaaataaccgagtatgaaaaggagatagaaatgccttttttaacacctactgaagaattatttattgcaagaactcgccaacaagatattattaaacttctgcaagtcaagtttggtgatattcccgaaatactgagcaaaaatattcagaaaattgatgatctaaccgctttagaagaattatttgtatcatcaattacgattacttctttggaagaatttaccaatttagttaattctaaattaccaacatcacaagattaatagtagaaaaaaacagaggtagagaaatagagaaatcttgaattatcttgaattatcttacatttatttctctacttccttacctgtttcaattttctaattaccttaatttggtttcaaccctcaaaccaagatatctgtttttatcaataaattaccgatacaaataattcgccatttataatctatgaattatgatttttgaattattaataaaaagagcgatcgcacaaaaactctattatctatacctagagaaaagcgatcacttttaccctataacttgactctcactcaccgctaatacataaaatgtctattttgtcaacccacccttttacaagacatggatcaacctctcatttcacccgcaaaaaagtttacgaaatcaccgcttttttctctatgcagattttgactatttctcaaataacgtaaaatcaagggttttggctatctataaacctttttttttaaaaagtatatactacgcctaaattatgaaattttaaaaaattatagcaaatcgctgaaagtattgcaagctcgtgggtaaataaaaataattctcaattaaatattaagaaaatataaagaggaaatttccaaatttaggaatatttaaaccattgatggtattatcataactttaaattatcactcaattaacaaacaaggttaaaatcagcttttttgcagcctgcttttatataggatagggatttatcaatactaaaaatatacgagatttgaaaaaacgagattaattataactttgcgcctttgcacctttccacctttgcgcgaaatcttgatcaaagtgtggttcatttacctgaaaatagctgtaaatagaaaaagattaaataaaccgatgacacaaccaaaccaactccccatccctccccacttccaccccaacaaagtcggggaaatataccgcgtaccttatcaacaactagcatctgaagcagaagcatggacaaaacaatataatattcccccagcagcaaccgataaaaaccgcatttgtctattattaatagatgtccaaaacaccttttgtattccagaatttgaattatatgtaggtggacaaagcggaactggtgctgttgatgataacaaaagattgtgtgagtttatttatcgtaacttgggcagaattaccaaaattatccccaccttagatactcacacagcaatgcaaattttccatccgattttttggataaatgccgatggaaaacaccccacaccagcagaaactaatatcactttatcggatattgaaaaagggatttggcaagttaacccagcagttgctcatagtgtgactaatggagattatgaacttctgaaaaaacaagcttttcactatgttaaacaactcagtcaagatggtaaatatcccctgacaatttggccttatcattccatgttaggaggaattggtcatgctttagtttccgcagtggaagaagcaatattttatcatagtattgctcgtcaaagtcaatcccaatttgaattaaaaggggaaaatactttaacagaaaattattctattttacgtccagaagttttaacaggatttgatgaaaaaccaattgccaaaaaaaacacaaacttgattaaacaacttttagaatatgatgcagtgattattggtggacaagctaagagtcattgtgtggcgtggacaattgacgatttattaacagaaattcaacaggtagatagcaccctgacaaataaaatctatctgttagaagattgcacatctcctgttgttgtttccgatgttgttgactacacagaacaagctaacatagcatttgacagatttgcagcagcaggaatgcacattattaaatcaacagaatgggtaattggtgatagttgatagttgatagttgatagttgacagttgatagttaatagttgattgggaaacataaaattgattacccagtcaccagtcaccagtcaccagtcaccagtcaccagtcaccagtcaccagtcacctagttaaatattcttttggatcttttgcagtccaaccaaggggttcattagcacgaatttcaaaatgtaaatgtggttctctagaagttggttgacctgtagcaccaactgttcctaatatgtcaccttgttttacattttgtcccagcttaacttgtattgtttctaattgagcgtaacgagtttgtagtccacctgcatgattaataattactaattttccgtagctggcttgatctttagcaaagactacaacaccaggagcgatcgcttgcacaggtttacctacttctgctactaaatctacaccactatgaaaaaaaactttacctgtaatcggatgaatttgccacccataaggtaaagctacagttgtagaattagctaaaggatatccggttatacttgccgatggtaaagttggtgtatttgctacaggagaactagcaattatccgattttgtctttctctcattcctggtaaaacaggaacaaaaacaactctggggttttgttgacaaccattaatttcaaacaatgtatctggacgaactttgtaatttgctgccacttgtctccaattttgaccactgggaacttgtaccacaattccatcaaaggggggaatttgcaattgattaccaggtgtcacagtaccgttattaacaaagggattcatgttaataattgtttctggcatgagtttatatctctcggctatgctatctaaagtctcaccaccagtaacttgatgtttttgaattctcgataaggctggagttggacaacttggtactgcattcgcgctttgcagttgtagcattgtggaaattagccccaaggtgctaattaagctacagagaaacattggacgatagcgaaaagtcatgttaactaagaaagaaatagctaattctagattttagttggggaattttcaagatgggatcattttttttgtttgactgataattctttcatggtataagtcctcaaacttaaccccagagtcaatccaaaatccaaagtccgaaaactgaaaatgatcccaaataatgtattaattattcaatttctgttaactaatctgttcactgatcatttacaagaaatagtgggaagtttgaaagcctaccagtaaaagcctgaaaatccaaaaagtgttcaggtttttacgtcctttaggggtgggatgaaaaacgactcaagcgactttagtcgcagtgccatcttgcactcgctttccgtttacgctataatttatggcgtaatataatagtcatctatgttagtatacgagttcaagttaaagggtaaacaccagcagttaaatctgattgatgaagcaatcagaactgctttgtttgtccgtaattcttgtattcgctactggatggacaaccaaaaactcggtaaatacgatctgagcgcatactgcaaagaactggctgcaaactttgagtgggcaggtaaacttaactcaatggcaagacaggcatcagcagatacagcttgggtggcaatttctcgtttttatagcaactgcaagaaaaaagtttcaggcaaaacttgtactgagcctgtcctgagcatagccgaagggcgtagtcgaagtaaggggtttccaaattttaagaaacgtggtcattctgtagaatacaaaactacaggatggaagctatcagcagatagaaaatatctaactctaactgatgggtttggaattgggaaattaaaattagtaggaacttatgatctgcatttctaccaaattacagacatcaagcgtgtccgattggtaaaacgtgcagatgggtattatgcccaattttgcattgctgttgaccgagaaattaaattaacaccaagtaaaaaggttattgctttagacgttggcttaaaccatttctatgctgattccaatagagataagatagaaaatcctagatttttcaagaaatcagagagaggattaaaacgcctacaaaaacgggtttctaaaaaatttagaaaaggtaaatctcaatccaataactacaaaaaagctaagaataaactagcaagaaagcacttgaaagttagtagacagcgtaaagactttgttgtgaagttagcaaagtgcgtaatccagtctaacgacgtggttgtttatgaagacttgcaagtgcaaaatatggttaagaaccataaattagccaaaagtattagtgatgcgtcttggtatcaattccggtgttggctggaatattttggtaaagtttatagcaagataactattgcagtaccaccacactggacaagtcaaaactgttctagttgtgggaaaactgttgtcaaaactttgtcaacaagaactcatgaatgttgccactgtggaactgttttagaccgagatgagaatgccgcactgaatattttagccaaaggattaagtacggtgggacacaccggaactaacgcttggggagagaacgacctctgtttggatttggcgacaagttcaggtaagttgactcagtgaaccaagaatcccccgactagaagtcgagggagtgtcaattagtaactgtctgactatgatcgcaattattcttaattaattaattaattaattaatatgaagttatctgtgaagcaattagccgtttatctgttcttagtggctatgggcagtagtctgggtatacttggtagtcgattttttcccagcaatggttcgtttcaagagttgaaaaatgttacagcggctttaccttcagaatctgtgattacctatccttctcagggcttgcctaattctactggtggcgataatgtaaattttattgctgctgctgtacagaaagttggtcctgcggttgtgcgaattaatgctactcgtaaagtagtaaatccaatttttgacgctttgaaaaatccaatgtggcggcgtttttttggcgaagatgaagaaccaattccccaagaacgaattgagcgcggtactggttcagggtttatacttagcgaggatggtcaattagtaacaaatgctcacgtagtcgcccaaacagatacagtattagtcacccttaaagatggtcgcacttttgaaggtaaggtggtgggagttgatactgttacagatgtagcagtggtcaaaattcctgcggataaattgcctaccgttaaattaggtaattcacaaaatttaattcctggtcagtgggcgatcgccattggcaatcctttaggtttagataatactgtcacaattggtattatcagcgccactgatcggaccagcgcccaagtaggcgttcccaataaacgggttagttttatccaaaccgatgcggcaattaaccctggtaactcaggtggaccgcttttaaatgcccaaggtgaagtgattggcgttaataccgccattcgcgccgatgctcaaggactgggttttgccattcccattgaaaccgccgcccgcatagctcatgagttatttaccaaaggaaaagcagatcacccttttttgggcattgaaatggtagacctttcaccgaccaaaaaacagcaattgaatcaagacaatacactcaacattcagccagatgttgggattgtgattaagaaagttatcaaaaattcaccggcagaggagggaggactgctccccggagacgtgattcaaaaaatcaacggtaaaccagtgaacatcacagcccaattgcagaaaattattgattcaagtcaagtcggagacattttcaaaattgaagttaaccgtaatggcaaaactcaaacctttaaaatacgctcaggaactgagacacaaaattagttattagtacaggcgtagttgatcacgtctgtacttggaactattgattagacaaatgctctaattgcattctttgttccatctgccgcagaaaataaccagtcatcattgctgatgctaacagtcctgcgaggttatctcggtctgtagtaacttgcacattaaaactctctcctgggagcattcctaccagtccttggacattctgggaaatgatttgtttaatttctgggctggcagattgggctacacgggctagaacgtcgggagattgatgctgtaaatatttcaataactgattcggattttcccccaagtgttcgttcagaagctgatgagtgtgttcctcagagttgtcattcaaaaaatcaggatcaaacaccattggcaattcttcttagcttagttgctaattctactttaaaccatatcacaagcctagcgcatttataagggaacaggagttcaaggagtcaggagttcaaggataatttaacccagtccccagtccccagtccccagtcacccatcacctgtcacctctaacttcagttctaactgttgttctttgtcggttttgggaataatttcgggaagttgatcaatttggaaatattggtgaaattttgacgtgacttgtaacgaatatgaccgggattcattgtctcgtcgtttacgcacaaatcctaattctaccagttcaggaacgtgctgatatacacctgaaccccgcagttctattaactcactttgcaaaatgggactgttaagagcgatcgctgctaaagtgcgtaaagcccccacacccaactccacagggatcaaagtctgtactaaatcatgaaaatctgaccgcagttgcaaactataaccatttgcagtttccacaatttctagcgcactatctcgacgggcataattatccatcagttcaattatcccttcttccgctgtatggcgatcgcacccagcatgctcggcaatttcactcacagataagggtttaccctttaaatacaaaatcgcttctattttgattgctatggctatattcttcttggacatatttaaaagttcaggaattcaggagtcgtaggggcgaagcattcgggcgataaattatcaatttttatcacagtttattttccgaatgcttcgcccgtataggagtcaggagttaggagaaatgaaaattgtaacttttgccttttcctattccctattccctattctctgttttttgacttttgaatgcatgacttttaattttcctcccctgctccgcttcctttcttcactgccaccaatcaccagttacctgttccctgttactgagaataaattctgcgatcgccaaatcttgaggagttgtcactttcaaattcgtttcttcccccggtactatccgtacttcaagcccgcatttttcaaacaaagctgcatcatctgtcacttcccaaccttgacgcacaccatcagcatgacattcttttaacaacttaacatcaaatccttggggagtttgcgccgcccaaagttgctctctgctgggtgtactttgaattatgccactttcccccacaactttaattgtatcttttacaggtatagccgcaattaaccctggacaatgaagaatagctgctgcacaagcattaaataagtccggtgtagctaaacatcgcgccccatcatgaattaatacttgttcagcatttcctggtaatgcctgtaatccgttataaaccgactcttggcgggtagcaccaccaggaataaactccacaggtttagttagctttaaatcagccaaaattgccttaaagtcctcccagtcatgaggttgggaaataattccgatccaactgatagcactagcagcttccgcagctaacaaagtccaagcaatcagagtttttgaacgaacctttaataacagtttattgcggtcagcacccattcttttgccgctacctgcggccggaattaataaatacacaactttcctcaattttgtaaatagcaggaggcaggagtcacgaggtaggggaagcaggggaggtaggggaggcaggggaagaaaagatttttaccaatgcccagtcaccaatcaccaatcaccagtcaccagtcaccaatcaccaattaccaatcacccattaccaattaccattccccatttcacataaaataaggacgataagcttcaataaatatattatttatgcgagtagtagcttttgtacctggttcaattggcgaccaagttctttttttccccacattggatgatctcaagcgttcctatcccgacgctttgatagatgtggttgtggaaccccggtcaaaggctgcctaccgagtgagcaagtcagttcacgaggtattgacctttgattacaaggaccgtaatagtttagcagattggggtaacttggtgggaacaatccgcgatcgcgaatatgatgttgccatcactgctggagaaagttggtttgtcggtttatttctctggttaactggtattcccactcgcattggcttccaaggtagtggtgcaaattttcttaccagtgttgtatctcccaatacatcccaatatatcccttccatgtatcatgatttgttgcaacctctgggaatcaagacaccttgcccaccgttagcagtaaatatactgaaaccagatattgaatgggcgcaacaacaacaaaaacgcttgggtattaatgacacaggttacatcttgctctctggtggttctggtaagttatcccaaattaatggtgctgataccagctatcctgtagctagttggcaacaaattattcaagattgtcaacgcaaacagccagatttaccagtggtggtcattaaagaaactgaggatgataaatttgtttcttccctggtggaatcttgtcccggtattaaagtaattgccattgatgatgtgggcaaattaactgccataattggtggagcaagtttaatgctttctctcaacagtgcgcccctacaagtggctatagctgtacaaacctatactatcgccctacttggttctacagacccaggaaaaatattacccaccagtgataaattcctcgccattaaatctcccactggcaaaaccgctgatatcgcacctgcaaccgttttagaaaaaatctggggcggttgactattagttttagattttagattttagattttggattttggattgattgaaaaatctaaaatccgaaatttatataacagatgacaaacattataactcctgactcttggggcagccacggggggattgcccctactaactcctagattcctatcttttttcaatcatttcaaaaaagctatcttctaattcataacccaagatttgcgcgaaagatttaagtcggaatggtgtgggaatactttgctgttttagccaattacttaaaataaaaattttgtgcatcaaaaaaatctctaaggcttcagggttgtactgtataccttcttttttagtaaactgatggggtactagcatagcagcataacgcgctaattccccagctttccagtctagtaaaaacggcaaccacggatatttggcatctaaacgcacaaaccacaacctgacctctggaatttctgacagttctcgtggatcatttgcctcccgtgggtaattgatttcaaaacgcaattgctgttcctgcgatgtaatggattcctcttgcagcaatggttcaattacttttaatgcaggtgacaaatctagattattgatagagtcgttattaaggctgattgtgattgtcattgactttttttggcagcttttttgattgcttaggagtagtatccagaatcaacagtagcagtttttaggtattgatgctactctattttgtatttgttaaatatcaacatttacttattaatcacattgaattttatagtgttattttttctagattgggtacttgtactattgacaatttaaaattttatatacaatttgccaaaataccacccctcgcctggacattcatagcctgaataagctaaagttgtaatgagtttgttttagagttaggatgtaattaatcatcaaccaaccaaaaacgaaactggctcaaaccaatgattaataaaggatattcgtattaaagacacaggtataagcaaagaatatattgtaaatatgtaatatccctgggtataaaaataatcatttttcatgaaatctgaaaactattcctacagttcctacagttaaaactgaaatatgcaaaaaccagctatttctacaaaagcaattcgttctttagaagatgctctagatcgatgtcaaatgctaggtatgcgcgtcagccgccagcgccgatttatactagaattactatggcaagctaaagaacatctttctgctagagagatttacgatcgcttaaaccaacaaggtaaagagattggccacacttctgtttatcaaaatttagaagctctatcaagtcaaggtattattgagtgtattgaacattgtgatgggaggttatatggtaatgtgactgatgctcacagccatgttaactgtttagatacaaatcaaattttagatgtacatatagaactaccagaagagttgatccagcaagttgaggcacaaaccggagtcaagattagtggatataccatcaacttttttggacaccgtcacttacaaccagatcacaatgatcattagacctctccaaaatagaatgtattaatttgtcataagttgtaggggtgaagtaggggcgaagcattcgagcgattaatgatcggtattcaccaaaggatattttccgaatgcttcgcccttacagggcgataatttaacgtaaaaatcagacatctagatatcccataagcttcgacctgcccccataaataggttccataatttcttttctagagatgtctattagtaactggctaatgctttacattatcactgctgataaattaaagtgacaaaaacaggtgaaaatgggaatgactcagctagggatgactgcggttttttggctgggaaaaaattctatttttatttaacctgactatgagcgatcgccctttaagtagtttaaatttacaattcttattaattgacccagatcccatctttcgtctaggactaagggtagctctagaaacaattccccacctacaagtagtagccgatgttcccacagataccgcagccttacaggttttagcggaaattgcagcaccggatcaaaaccaagtcaatttaatagttttagaattaggcaatggcagttctagcgaatctcaacagctagggttacaattttgcagacaacttaaagctttatatcctcatatacccattttgttgttaagtgctatttctacaacagaaatgttattagcagcaaaaaatacaggtgtaaatggctattgtcctaaaggtatatctatttctgaattagtacccatcatgcaagaaatagcatcaggtggttactattggttaggaacaacaggaataaatttccctttatctaatttaccttttgccagactcagaaataatatcaggttaacaggaattaatcatattaataataatctatccgcagttacagcacaattaaaaattcctggattaccattattagataaagctattttggcaggacaaagaagagaacttttagcagcgcgttggttagtaaataacttattgtctgcaccagaagaaagacaagaaatacaaaaatctcaaccattaccgctacccatttcttactcaaatagcgccattagtaaagcagaatcacaacaaatgcaaactgttgtaccgcctttactgagtccaaaagcactacaatctataatatttacatcttgtactaataaactccagttttctttacaaaatctgacagacatacctttagaaattgatattctgcgtgaagacaaaaaaagagaactgctttatatcatcttacaaaaagtatctcaaaaattagatgagctacgtagttcaaaagttgaaattccacaaatacctgagttaaaaaatcagattctcactaatttatgggaatcagcaattaccgaattttacggtaaatcttcccggataaatgtcggagatgtcaatatagaaatagtcacttttttattgaaaaatgcagcaggtgtagaaactgaaatcctcaataaaattcctttagtagaagacttgttttcttatctactttggcaaacagatttatatattgacaacacatcttatgcagcaggaagtgaacctgcaaattctcaagcatcaatgattttagagaatttagtaattcaagttgccaatggtgtattacaaccattattaaattttttagcagatgtggaaaccatcaaacaaaatttttatgatcgtcatttaatttccacaagagaaattgaaagatttagaaataatttatcttggaaatacagattgaataattatgtgaatgaaccccaggcaatttttgaaagtcgctatgaactatttgtatttgcacctcgtggaattgccaaaatatcaatttattctcctcgtaaccaagaattagcaaagcttgccgatatccctttagcggtgacattactgttagaattgcgggatgcgatcgcaccacgtttacaatctttattatcttttttaggtaatggaattgtatttgtattaacacaaataattggtagaggtttaggtttagttgcccgtggtattcttcaaggtattggtagtgtttccttcacagaaaaaactttaaaacgtaatagcgacaagcaaaacaataacaaaggtagaagtcaggagggaagaggtttttaggcattttacattttgttgcataacttgttttttcgtgccgacttacttagagtttgctgaaatattgccaagagctagagaaatcaagagattttcctcctgactgctgtaggggcgaagcattctgccgataaattatcaatttttatcacaggttattttcctataagggcgaagcattcgggcgataaattatcaatttttatcacagttattttcctgtaagggcgaagcattcgggcgataaattatcaatttttatcacagttattttccgaatgcttcgcccctacttcgcccctacgactcctaactattaaaaatccgcgctttgtggtgtacgggggaaaggaatcacatcccgaatattccccatacccgtcataaactgcaccagtctttcaaaccccaaaccaaaaccagcatgaggtacagtaccataacgacgcaaatctaaataccaccacaaatcttcagttttcattccctgggctaaaacccgtttttctaacacatctaatctttcttcccgttgcgaacctccaataatttcacctattttcggtgcaagaatatccattgctctcacggttttttcatcatcattcaaccgcatataaaaggctttaatttgcgctggataatctgtaacaattacaggttttttaaacaattgttccgctaaataacgttcatgttctgattgtaaatctgcaccccaacttacaggatattcaaattttacatccgctttttctaaaagtttgactgcatcggtataagtcaatctttcaaattgattgttaataatattgttagcagtgtctaaaacagtattatcaattctttgattgaaaaattccatgtctgcttcacaggtttccatcacatatttaaaaatatgttttaagaaatcttctgctaaattcatatctccttctaagtcacaaaacgccatttctggttcaaccatccaaaattcggctaagtgacgagaagtgttagaattttccgcgcggaatgtgggaccaaaggtatagacgttagaaaacgccattgccattatttccgcttctaactgtccacttactgttaaataagtcggttttccaaagaagtcttgactataatcaacttctttattttctgtgcggggaatatcttttaaattcaaacttgtcacactgaataattctcctgcaccttcgcaatcactggcggttaaaatgggagtatgtacccacataaaaccccgttcttggaaaaattgatgtatggcagttgcacaagcatttcttacccgaaatactgatccaaaggagttagttctacctcttaaatgggcaatggttcttaaaaactcaaaggaatgacgtttcttttgcagaggataagtttcgggatcagcatctccgtaaacttttactgcatctgcttttagttctattctctgtcctttaccttgagatgcaactaatattcctgcaacttcgacggaagcacctgtatttatctgttttaatatggcttcgtagtttggtaattcttgattaataactatttgtaagttggctaaacttgaaccatcgttaacttctaaaaaggcaaatccttttaattcgcgtttggttcttacccaaccttgtactgttaaggtttcttctggttgaccacttcttaatatttcagcaattcgatgtttaatcattttttacagtttggatttttttaactatatataacattaattttagtcagggaaaagggaacaggggagatggggagcatcccaattttgcaaaaacaaccgccacaacaccaaaaactctcctcttccttcttaccttcgtgtccttcgctccttcgtggttcgttaatttcaggtcttgaactcaagcaaaaaataaacttacacatttgggatgctcccgggagatggggaggtatcaagtcaaaagtcaaaattaagaaacttttgcctattgcctattgcctattgccttctttcccaatcaccaattacccaatcaaaaattttaacacccatcctataataattcctaaaccaccaaaacggactgcttgccaaaaaggccgatttaggtttttccaggaaaataactggctttctaggttaacttctagggcttctagctctttttccaagcgttttaactcggctgtgatttctggtgtctgatttttattttctttgagatttctaatttcttgttgccattgtgccttttgttgttgatcccgttgcacttgggcatatctttcttttaacagtcgcagtccggtttctagttcctgtagttcctgttcaaagtccgtttgctggttttcctctggtttggtcattggtgatgggtcattggtgatgggtcattggctatgataattacatcataacttttactcttaactcagcacttagtcttatgtatcaaaccagtcaattaaatgatgttactactctggaacttgcccaaactttgatggaaaaattgactatttctcctgatgactggcatcgtctcaagtctaaccgcaatgcccgcgctagtgagcttgtagcggctgctatggtttttttggtcaaaaatgagcctcaagaggcacaagctaggttagaacaggctataggctggttagataagtctatttctgcccctccttgtcctactcacggtaaacattgagggattggtgattggtgattggtgattggtgattgggaataatattacccattacccattacccattacccattttctatcttcttaaagataacaaacgccgagtttctatttgcttgcaaagtcttaattctgttcctttgcggttccattgtacttgatcaaatatttgatgcagaagagacatccctcgaccgttttctgattcatctggtggtaaaaagtcggtgggatcattatgagcattacaacaaggagtaaaaccattaccttgatcggagataatccaccaatattgattatctatcaaggaaaaacgaactactactagtttactgggatcaagattattgccatgtttagctgcgtttactagggcttcttgcagtcctagccgcagttcggcttgtaattttgtgggaatatctgccaatagtaaatctaatattgggcatagataaagagtggaggcaaaactaatagtaccccaagagcgaccaagtggacgaagagaaatggtaatcacaagagaaaccccgtagcttttagttagctagacatcagtttgctgttatcggcaccctgataaagattaaggtggtcatgctgccttcaaacttgcgtctgtaaaactaaatttatgaaattgctagggagcattgactctaaatataagtgaaaattgcttaattaaaatttggctgtaattgttttgctaatacaattaacaacttctatgtttctatttattactttgggaaagtatataaatattcaactttctttgtagccgcttaataattcgcacaatttatttcactttttcaaatcagagtcatgcaactttaatggttaaaaaagaaatctctatttttaggttaattttattttagcattattagtatgcactggactacaaattttccatttaagtttttgtaaacaattggttaacatataagctaaagtagttgcttttagcatggatatcgctggagaaaggctgctgtttctacgtgagcggtttggggaaaaaagtcggctggctgtactcttgtaagatggtattgtccatgttcacacagtaattttaggtcacgagccaaggtggctactttacagctgacgtaaataatgcgcgaaggtttcaggttcagtaaagatttgatgacattagcttcacatcctttacgtggcggatcaagtaagacaatatctggtataattcccaaatttggtagagttttctccactgctcctacttgaaaggttacattattaatttcgttttgttgggcattgaaaattgcctgttctacggctgctgattgcacttccaagccaataacttggcgtgcttgttttgctaggggtaaagtcaaagtaccaataccacaataggcatctactaaaacttcctgaccttgtaaatttaattctgactgaatgacttgtaacagtgcttcagccgtttctgtatgaacttgaaaaaatgtatccgggcggatttcaaattctaaaccagcgaatttttctcgcaggtaaggaatcccagcaatacaagttgtatcttttccaaatatagcatttgtgcgatcgctattgcgattcaaacaaactcctactaactggggataacgctgtaaccattcctgggcttgggtttcaatgtctggtaaatttctatctttgactactaaagttagtagcatttcccctgtacggcgacctatacgtaaacttaaatggcgaatttgcccttggtggcgtttttcgtcatagattgaccaatcccgctttttaatatcctgttttacttctgctaataaaggatttaaacgagcgtcttgaactggacattgatttaagttaatgagttgatgactacctttttggtaataaccagcttgaacttgtccggtagctgagatccggacgggataggtggctttgttgcgataacctaaagatgatgatgtggataagacggaagctaccggtgggttaacaaaaccgcctattctttctaaaacttgaattacttgattatgttttgatgtaagctgataatcataatttatatgctgccactgacaaccaccacatttatcagcaacaatgcaactaggtcggatacgttgaagagatggttgaaggatttgtttgagggtagcatgagcatatttgggtttgacgtgtgtaagtctgactaaagtgcgatcgcccactactgtatcaggaacaaataccacacgctgctcaaagcgtcctacgccatcaccagtgtcgcttaaatcagtaatttctagttctattacttcaccctgttgccaaactgtattagtcattagtcattagttattagttattagtgggtgggaatagggaatagggaatagggaatagggaataggaaaaatattattaacaaatattaatttttaccaatcaccaattaccaattacctcttccccagtcaccaatccccagtcaccaatcaccaatatacccttcacttctgtaccgcgaactggttaaactaacaaataatataatttccgtgattacataatcatgactgtaattagccaagttattctccaagctgacgacgaactgcgttaccctagcagtggcgaactcaaaagtatcaaagaatttttgcaaacaggcgcacagcggactagaatcgctgcaaccctgtcagaaaacgaaaaaaagatagttcaggaagcaaccaaaaaactttggcaaaagcgccctgactttatcgctcccggtggcaatgcttacggagataagcaacgcgctttatgtatccgtgacttcggctggtatctgcgcttgattacctatggtgtgcttgctggtgacaaagaaccaattgaaaaaattgggttgattggtgtacgggaaatgtacaattctctgggtgttcctgtaccgggaatggtagaagctatcaactgccttaaacaagcatccttgggcttactgagtggtgaagatgcagcagccgcagagccttactttgattacatcattcaagcgatgtcctaattacaaggtttctctgcaacattagcgatcgccatcacggctggtgctttgcgtaaagctactggtgatcttgctcatttgatcactctttccccacacttgatagttgctatggcaaaattatggcaacatatttgtcaagttattataaagttgtggggatattttatgtgcatctactgacgctcaccaaaaacaaaaaaccgacaggaggctgtcggtcattagttgtgttccctattaatgactcggctagagttcagttatgagttattatcccaagatgttcattcttagaggaggatcttcatcatggataatggtgattgtaatcatattcatcggtgattttaatcactgaagaattgaagaaaaaatgtatacctttgagcaattgattgaaagagaaaaatacatcattttgatggtagcagaaacagtcaattgcatatattagtcaaatctttgtaaacactaacacattttggtaaaatgtatctgaatcttattaaagtagtagcagcaacaatcttattaaatggaattactgcttgtactacacctactcaaaaccaaatttctgcggacaatagccgcattaccgaaaataaacccattgtagatagtaataaatctgcacaaaatagaccaaataataaaacagctactatttctgtggaaggggaaaaaaccaacatttccttaaaactttaccaggagaaaaatatatttagcacctactttcctcaagaggattttttagttcaaaataaagatatcaataaagtaagagaagtgaaatttactgctaattttggaggtgtaaaaaatgaaaatgcttatgttaaatttgtctttcctgatgatttaaaagctttagaagaagtcaaaaattttattaatagtaaagatgggataattgcatctaataaatggcaaattgtcaatcgtagcagcactgtaacctatccttgggcaaaagcaaagattacttttagtcaaggtcaagagatttttggtaatatttatattggagaagaaaagggtaaagtattttatgcaattacccattatccagcagaatatggagatggttttgaaccaagagcagatttgattttaagtaatttggaaataggtggataatgtcaaatcttttaactgtcacctttttatttctgtcgtagttgaaaaaataggaatttttcgcagggtgaaaacagatactatcttctatcaactctttcaaacattaccaaatattctttttgaattgattggtaaaccagctacagaagcagaaaattatcaatttacatctgtagaaataaaagagttagcatttcggtttgatgggttattcataccaaattcagagatacctgaacaaccgatttattttgttgaggtgcaatttcaaccaaaaacagatttttactggaaattatttgcagaaatctttatttacctcaatcaatatcaaccaaaaaatgattttcatgcagtagcgatttttgctaaacgtagcttagatcctggtgtacctatccagtatcgaggtttgctaatgagtcagcaagtaacaatcatttatttggatgaattagaagttactaatgataattccgttgggttggggatggtaaaattagtagtagagaaagaagaaactgcaattgatcacagtcaacagttaatggacaaatcccgacaacaatttacagatgcagcccaaaggcaaaaagtcttacaattgttagagacgatcttagtttataaattcaataatttaacccgtcaggagatagaagcaatgtttacttttgaagatttaaagcaaacaaggtatttccgagaagttgcggaagaagaaagaacaaaaggtaggctagaaggtaggctagaaggtaggttggaatcagtaccgctattaatagagttaggtttgacggtggaagaaatagcaacaaggttagatgtggatattgaagcggtaaggaaggttgcggaaaaatctggggatcaaaatcctgtggagtaaggttaagaggaaatggaaagtgattagtttaactgatcacttttttcaaaattctatctcatcatgggaaataaagccatttttgacatctaaatcaccatgattattatgcttttactctgcgatatgcagtgtttttacccttagtattttctacacgagatattaaatttctttcagttaatcctttattagaaacagtttgattttcaaaagattctatacctttattatacaaaattgttataataccttcctccgattgacgtttattttctgcatttcttctaagaaaaacatctttgtcggaagctcgtattatatcccaatcaaattcaatctcatgaataacatatattatttgaaattatctatttattgaaaatatttatagttttttatgttaaaatcatatactgtcttaatactagtattcccagtcagaaaacaggaaactagatcaacccacccaaaaattaaccaacatgaaaacatctaccgatatacaacgcaccttagaaatggcttgtgtttttttaacagatcaatttttttctaaccctatttatctttagtcccctagatattttcttgatgtttcttaatatctgctagtatttcatccattgtcacctgatctaaccattgatgacgttcttctgtatagtctccactaccattatcaaattgacgaataaatctgatagcgtccacatatcctaaagcatctacaagagcttgaaatccttttctgtataattcaattggggtcattttctcctccttgtacaatattattagtagcttctgctaaccagatcattggattagcaactattatagttatattatccttatagcttaatgattttgacaatagacggctatcagtggttagaaaaatatcggcgttattttcagcacaagccagatgaaaagcatcaaattttttaatattaaaagttgttaattctattgcacgtctagtaatttcttctgtaaccaaaatcttatcatgagccattcttaatactttttgtacttgctctctcctgtttatatctggagtcctagcaatttctaattctaaagctgtactgctgactaattgccatgttccagatagacaattattgataatttctaaaattgcttctgtttctaacctaattcgccattgggtttggtcatcaaaaggacgattaaggcaacaaacgtccaaatatattctatattgtttattcatagttttaaaacaatgtagaagaagattatactccacttgatgcgtaaccagataaaatagtcatctgtcctcttggtgcataacaaaccatgaccaccgaaagtcccttttctccccaggaaatcgcctcagaaggcattaaaccacaagaatataccgaaattgtccgccgcttaggccgtcaccctaacaaagccgaactaggtatgtttggggtaatgtggtcagaacattgttgttataaaaattcccgtcccctcctcaaacagtttcccaccacaggaccccgcattcttgtcggacccggtgaaaatgccggtgtggtagacttaggcgatggactgcaactagcttttaaaatagaatcccataaccatccttccgcagttgaacccttccaaggtgctgctacaggtgtgggaggtatattaagagatatttttacaatgggggcgcgtccaattgcgttattaaattctctgcgttttggtagtttggatgatcccaaaacccaaagattatttaatggcgttgtagcgggtatttcccattatggtaactgtgtaggtgttcccacggtaggcggtgaggtttattttgatccagcttattcaggaaatcccttggttaacgtcatggcactgggattaatggaaacaccagaaatagtaaaatccggtgcttcaggaattggcaaccctgtattatatgttggttcaaccaccggtagggatggtatgggtggtgcgagttttgccagtgcagaattaaccgatgagtcaatggataaccgtcctgcggtgcaagtgggcgatccatttttagagaagtctttaattgaagcttgtttagaggcatttaaaaccggggcagtggtagcggctcaagatatgggtgctgcgggtatcacttgttctacttcggaaatggcagccaaaggcagtgtcggtattgaatttaaccttgacaaagttccagcgcgtgagtatggaatgataccttatgaatatctgctttctgaatctcaggaaagaatgctgtttgtgtccgaaaaaggccgagaacaggagttaattgatattttccaccgttggggacttcaagcagtggtcgcaggtacggtaattgctgaacccattgtcagaattttgtttaagggtgaagttgctgcggaaattcctgcggatgctttggctgaaaatacgcctttgtatgaaagagaactgttaacagaaccaccagaatatgcaaaaacagcctgggattggagtgttgatagtttgcctagttgtgatgctaggggaattacagttaatggtaagttacaaagttggcaggatgttttattaactttgctgggtacacctaccattgcttctaagagttgggtatatcgccaatatgatcatcaggtgcaaaataatactgtgttgttgcctggtggggcagatgcggctgtagtgcgcttacgtcctttaaattctttcccagtcaccagtcaccgaagcggagttgctgctacggttgattgtaactctcgctatgtttatttagatccttatgagggtgctaagtctgttgtagctgaagctgcaaggaatcttagttgtgtgggtgctgaacctttagcggtgacagataatcttaattttggtagtcctgaaaaacctatcggttattggcagttagcatcagcttgtaaaggattaagtgaagggtgtcaggagttgggaacgcctgttacgggtggaaatgtttctttgtataatgaaacttttgacgctcagggaaatccccagcctatttatcctactcctgtggtgggaatggttggtttaattgaggatttggataaaatttgtggacagggctggaaaaatgtaggtgatgtaatttatcttttaggtttacctgtgcaatccaaaatccaaaatccaaaatctaaaatcgaattgggagcttctgaatatttagcagcgattcataatacgattgcaggtaaaccgccaagggttaattttgatttagaacgaaaagtacaaagcgtgtgtcgttatggtattcattctgggtgggtgtgttcagcacatgatactgctgaaggcggtctaactgtagctttggcggaatgttgtttaagtggaaagttgggagcagaattaaatttaggtatttctgcaaactctgcttttcgctttgatgaagtgttgtttggtgaaggtggtgcgagaattttagtttctgtgagtgtggaaaatcaagaaatttgggaatcctatttacaggaacatttaggagaaaattggcaaaaattaggtattgttgctaatttggcaacagggttaacagtgactactgctgatcaccaagaagtgatgaaagtcagcattagcgatatgagcaacgtttacgatcaggcgatcgcccaacgtctcgctctctatgccaatacataaaccgcatcaatgtcaaggatcaggcatgaaaatttacaattcatcccccatccttgaccaatttacggtactgttttaatggatggttaaagatttattaagaggcaggaggcaggagtcaggagtcaggaggaagaaggtaaatatttctccccagtcaccagtcaccagtcaccagtcaccagtacccagtacccagttaccaggagcaaaaaccagcatgattccccagcattctatcacttctgatccatctataaatattagtgaaattagtgaaaacgcttgtgataaaccagaagaggcgtgtggtgtttttggtatctatgcaccagaacaagatgtagcaaaaatggcatactttggattatatgccctgcaacatcggggtcaagaatctgctggtattgctacctttaatggacattatgtacaccagcataaagatatggggctggtttctcaagtatttaatgaaactattttagaagaattagtcggtaatattgcagttggtcataaccgttattctactactggttctagtcgcaaagttaacgctcaacccgcagttatctcaactcgtttaggtcatttggctttagcacataatggtaatttagtcaataccatacaattgcgggaagaattacttcagagtaatgttcatttgctaacaaccaccgattcagaaatgattgcttatgcgatcgcagaagaagtcaatgctggtgcagactggttagaaggtgcgattcgtgcgcttcaccgttgtcaaggtgcatttagtctggtagttggtacacccgatggtatcatggcagcaagagatcctaacggcattcgtcccctggtaattggtacattagacagtgatccagtacgttacgttctcgcttctgaaacctgcggtttagatattatcggtgctgaatatctgcgcgatgtcgaaccaggagagttagtttggatcacagaacagggtttaacatcatataagtggaatcagcaaccccagcgcaaactgtgtatctttgaaatgatctactttgctcgtcctgatagtgtcatgcacaatgagacattatatagctatcggatgcgattgggacggagactagcggaagaatcaccaatagaagcagatatagtatttggtgtacctgattctggtatacctgcggccattggtttttcccaagcatcaggggtagcttatggtgaaggtttgattaaaaatcgctacgtcggtagaacatttattcaacctacccaaagtatgcgggaaacggggattaagatgaaattgaaccccctgaaagatgtattgtatggtaagcgggtggtaataattgatgattccattgtccggggaactactagccgcaaactcgttaaagcattgcgtgaagcaggtgcatcagaagtacacatgagaatatcttccccacctgtcacccatccttgcttttatgggattgataccgatacccaagatcaactaattgccgctaaaatgtcagtagcagacatagccaaaaaattagaagttgatacccttgcttatttaagttgggaaggaatgttagaagcaaccagggaagatacaaatagtttttgttctgcttgttttacaggtgattatcctgtagctattcctgaacaagtgaagcgttctaaattgatgttggaaaaagctacagtctagataattgtatcatcttgtggggtgggcatcttgcccgcttcaatattttattttgtcagaatctttcatcctgtacatccttaaatcctggatatcctgattcagaaaaacatccttaacttaaaatcactcttttgcagctaacaaagcttcttgataaagtcgtgaactaatatgtttaccttccctaattaaatcatctaaaatatccttgattgcaggaatcaaaccttgttgctttgctactaataaaataccaattgtaccagaaatgttgaatgtcgttacaaaagtttacatattcagttatagtagtcctattaagggtgaaaatgtcaacatctcatgatatcttccatccaatgaacataactaatttgttgacacatacaa

SEQ ID NO: 38 - DNA, 49609 bp, Sphaerospermopsis sp. LEGE 00249
  LEGE00249_53
actgcggttttgagatagatagggatctaaacgctgcaattaatttatcgcgtctggctaaggcgtgaaagtctactgagggataactgctcccatgctcccgttgaagtagaaagtaaagtctagttttgtctaggttttatatagcagaaagttaggctttatgttaagttgtatcgagtaattcttagtgacatttgttcagtacaggcaattctcgagaattatttgaacaagcttctcgtttaactgtacctatgcggattgcttcgtataggtttgtaagagcttttaaatcatcggattgatagcacctagttgccaatacctgaaggagtaaaccctctgattcaacactaagatatccggtttgaaaggcagatgcaatgagtgtgcgaatcatgatcaatagggcaaatgaacgatttatcatttctattgtcaaacacttgcttgctaaatacattgatataaaacagtaaatattcgtgattctcattacagaaaagttgtgacctccatcacgattaaaaaacagaaatcctctataattaaaggcttttatctacgtactgataaactaaaagtagccaaaagtacaactagttcaaatgtgatcaacaatgatgttaagtatgtaattatactataaagattgtatgaagaaaggaatatttagtatcaaagattacaatttaaaaaatctttgctcacggtaaaaattggcggaaatcttcatcctgttgacttaactgcacccaatttaaatttagtgattggaatttttgtaccaagcgatcgcacgctgggcgttcagtggcatagtgtccagcatcaattaaaattaatccttgatctctactttcttgaaattgatgaaatttacaatcggcggtgagataggcttgggcgttggttttcaccactgcggaaataaaacctgcgcccgatccgcccaaaaccgcaactcgtgaaatttgctgttgtaaattcgctgcgggggaaaaaatcaattttgggggatgaagttgagtttgaattgtcgagagtaattcttgcaatgttaaagctggttctaacattcctacccgtccatatcctaaaccagattgggtgggaactatgggagataccgcttgcagttgtaatatttgtgccaatacatccgcagtgccatcatttacctggtcgaaatttgtatgggcgctgtagataccgatattgtgagtaaaagctaaccttaccatttctgctagtgcttccccactgcggagagatttagggggattaaaaatcaggggatgatgggcaaaaatcagattagcgttgagagcgatcgcttctgccatcactgctaaagtcggagttaaacacactaatacccgtgcttcttcctctaacacaccaggttcaatctgccaaccacaattatcccagttttcgcaccaagcgggatttgcccattcttcaaaccaggtgattaaatcagtaattttcattagatattttcacttattattttaagtaattttacataagcaagataattaaaccattgtagcctaaatttagctatggtgaaaccacatccaacacaggtaggaggcaagagtaggaaaaattgggagcatcccacacagccacaccaaaaactctcgctcaactttcttacctttgtgtcctttgcgtcctttgcggttcaatcatatcaggactttggtgcatattatttccatagataaaaataaatttacacatttgggatgctcccgaaaaattgaagtaggaaaaatttatgacatacttttgattaaagcttgtttaaactcttccgcactctgaaaagtaatttgcggcttttccaccaaagccaaatctatcacttcagctaattttggaggaatgttgttattacgcttacgaataggtacaggatcattttgcaagactgctaaccaaggatcacctgtaaaatcgcggggaaaatatcctgtgatcatattatataaacaagctgctgttgcccaaatatcaacttctggcaatgagttttgaaaatctagcacttgctgacgtgggataaaagcaggtgtacccatttgattttctgttaaagtttgaccacttaaaccggctaagtcaaaggctttttctaaaccataatcacctatttttgcaactattttatcattaatgtatgtaatcaaaatattatatgggtttaaatctcggtgaaccaatcctttgccttttcctagtgtaccatcaggtaatttcacattgggaacttctacttgatgggcatagctcaaaccgtcgagaacttggataattatctctacagcaatatctgtaggtaaacgccatccagacctttgcattaaatcccaaacattacctccttcacaatattccatgataaaaaagaaagtttcttcagcaaatccataatctaacatcttcactacatggggatgttctaaacatttagtattttctgcttccttgagaaacttatttataccttcttcctgagcaacaacggacggagacattaactttatagccacaaattttcttaatttgttgttttctgctaagaatacttcacctaaaccacctttccctagagacttaactaatttataacaggagatgctttgcagattttcttgaccttgtgcagctaaatctagcaagcgttgtataatatttaaataatttttgggttctactttttctacaactggattggcagttttaattggttgtaatttttctaattctatagctattttaaataaaatatcccccactttaatttcatcaccatcttgtaaatcatattgtggaaaatttaactttaaaccttcttgtgctgtttgatggcgtttcctttgaccgatttttttaccattaacaaaagtgccatttaaactgcctaagtcgcgcacccgaatatctggagggttaatatctaataagcagtgatagcgggaaatagtcatatcaatttcattggctaattgtaggttacaatcatggtttctgccaatgatacaagtgctacgagaatcaaaactatattgcttgccagagagtgtaccttgagtaatggtgagagtaattttcgatggcatggtaaatttatcagataagtggactattttgtatatgaatatattttgatattttttgagagcattttgtattttcttaattttgggtaaaataattatcagttattatcagttattatccccaaatgtgaactaccaactctctggtatgattatgctggcgatgttcccaaatgtaaataccttgccatgttcccaaaactagattaccattattaatggggatgttttcggaggtatgagttaaaactgtgcggatgtgtcctggcatatcatcagcaccttcggcatcatgaatataatagttaccttctggtactaatctagccataaaatttgctaaatctattaacacatcaggatcagcgttttcttgaatgattaaactggctgaagtgtgacgcaaaaataaggtgcaaagtccagttttcactccagattcgctcactatagcggcaacttttgatgtaatattctgaaaggatttgccagttgtggaaattctcagtaatttttgatagtgtgtcataataattttggattttggattttaggttggcagtgtttcaggaattttagttaaattgactgaaaataatctatcactgctttggctatagtttcattaccatttttagttatgggttgtggttgttttggcggttggggtaagtcatgaagaaaatcccaagttccatcaaaaaattctgttggtgtgataatttgatggtggttgtaatttttaattcctgctaatagcaaatcagcttccgcaaagtcatgacgcgggatggtaataataggaagtcctagaagtgtagcttctgcaaaagtgctgtaccctggtttagaaactactctgctacaaattggcataaaatcaacaggacgatattggcgattttgcactttaattaagttaggtaaatctggtgcggaagcatcaaaggcgataaattgccaatcagaaaatttttcaatattattataaggaattgcttgtaaacctaaacctccaaatgttagcaagatggttttttctggtggtgtagttattccccaaatggtgcggatttcatcaatagggaaaccgggagaaccacctgttaaacccacatctatgatattaggaaaagcagacatgggtgtatggaagggaagacgaaataagcgatcgcttttagtataccaatcactgacccaatcagcaatttctgtaaattctcctccccaatcttgataaataaagtcccaactaaagttactaatcatccaacagggaatgtttgctgctttcccaaacccagccgccagaaaaggaatatctgctaatatgagattaacacgattttggcgaagaaaattaacttccgaagcaattaacgaattttgattttttttaatttctcttaacttgtctaaggttgctgctttatccattgtcaaactatcagcttgaactacacctaaatcaaaagcacgttgacgcagaataaaatcacctttgatgtaggattcaagcagccatcggggtgcagttgtagcaataattaacagcacttctgggcataatttttgaattgttgcagctattgatgcggttcgggtagcatggccaaagccgtggttagtgatggttatatataaaattggacggttcataaatgagggaatagggaatagggaatagggaatagataaaagaaaacagttattacgtaatcattgagttttacatctacagatgagaaaattctttaattgctgctattaattgatcaatttctgattctaaggtgaggtaatgaacacttacccgaatacaattaggattggcaattgtgcgagttaagattttttgtgattctaaaaactgcactaattttaaactcggctgattattggttagcacaaaagaaactaacccgctttggggaggggaattttttaaacatttgacattaggtaattctatcaacttttgccaaagatactcactgtttctgcaaatttgctgatatctttcctctgctgttccccattgatgatgaatggcgatcgcttgttttaaagcaatatataatggagttgctaaggtagacacttcatatcttcgcccatctggttgccaattaattggttgtgcttgattattagtgatgactccatctaaacctataaatgttggctgcatcatttcccgtgcttcgggtcgtacatacaaaccccctacacccgcaggaccgcataaccatttatgtccagtaaaagcatagaaatctacccccaattctgttagatttaaaggtagaacccccactgattgagccgcatctaccaacaacagagaattattttttctgcatatttctgcaattttgtcaataggcaaaacttgaccagtattccacaaaacatgacttaaaactaccaggcgagtattagggtgtatattttcagcaataacactgacaggatcaccgacgtttaaagtcgccatgagtggacaagtggaaacttctacagcgaatctacgactaatttcttgggctgtggcaatcactccgggatgttcacagtcagaaagtagcaagtgatcaccagcttgccaattaatcccccacattccgatgttacagccaatggtgacattgcctgtgagagtaattgtgtcagatggtacatttaaggtagaggcgatcgcctcccttacagattgcatttggggagatatccagcgataagcttccgcaccaaaaggtcctatttcctgaatatgcgcttgagtttggctgatagcatccatcgccccttgaggcattggtccttgtccgccataattaaaataaatcttgttccctaaagctggaaatttttgccgatggtgatacaacatatcaatatcaattttagattttagatttgggatttgggatttgggatttgggatttgagattttggatgggaaatttaaaatgttaaatccgaaaattgagcataaaaccccctatttaaccccctatttattcataatattcttctctcctaactcctaactcctgtacgggcgttcgcgaagcgtgctggaagcatcagcattcggaaaatagccttttcataaaattgataatttttcgcctgaatgcttcgcccctacttcgcccctacttcgcctctacgacttctgattcccaaaatatcccaattgttgttaacttaaatgaatgatcattaatgctgaactcctacttcaatatcaacgctgtaagcgacggccttttttagatactcatggtgactatagccagcgagatattccccatgagttgttggtaaaagtgcaacaggataaaattgcccatcagaaaagtataattcataacctgtcatatgacaaacctgtttttcctccaggaaactgggaagcaggtgcagcagccactatagaactgatgcagcaaggtgtggagtatatacataattctgtattattagccacttatgaagatgaatatactttactgagtcgtccagatttacttgtcaaacagcctggaaaatccagttttggagactgggtttatgttcctgtggatattcaactaggtaaacgtcccaaacaagaatatcaggttatagctgcttttcacgcagaaattttgggagcattacaggaagtaacaccagatgaagcttggttaatcttgcggaataaagatacaacttatgtggtagacttggataaatggacaccacaaatgctggatattttggcggagtatattcaagtggtagagtcgccagaagcaccagaggtatttattgcccgtcaaaaatgccatctttgtcactggtataatcattgttatgcgatcgcccaatctcagcaacatctgtcactgttaccaggtgtgacaccaattcgctacactcaactacaagcattatctactactactttagaaacactcgctaacacgaatcctagcactttagaaaatgtcattggttttgatactcaagtagcatctaaattaatagtacaagcaaaatcaacattagcaaaaactcctttaattttaccctttgctttaccagcagaaaaactcacatttaccgcccccatcgagttatattttgatattgaagcccaaccagatttaaatttaaattatctattgggggttttagtagttgatagagaaaataatacagaaaagttttattcatttttagcagaaacaccaactcaagaaaacctaatttggcagcaatttttagatttagtttgccaatatccccaagcaccaatttaccatttttgtaattatgaagtcgagacagtaaaaaaactaggtaaactttattgtacaccttattccttaattgaacctctactgactcgatttgtagatatttatgaacaattaacagaaagtgttgccttaccagtagaaagttatgccctcaaagcgatcgcacgttggttaggatttgaatggcgtgatcaagaagctagtggtgctaagtgtatttattggtatgatcaatggttagaaacaggcgatcgccattttctggaactgatccaacggtacaacgaagatgactgtcgtgctacccgcaaagttaaagattggctagttaattttttccaaaccgaatatactagaaaattagcgtaatccaattttggattttagattttagattttggattttgcaaactacatcctacttgtccaattgttaattgttaatttttcacttttaattggggtttgctgaataaacctaaaaccttgatatatcaaagcttagaggctgataaacacagaaattagtgcaagggttttgaagggtataccggaaaaagtgtgcattttttgggatttcaacagatggcaaagaaattttcaaatctcctcctgactcctgactcctgactcctgactcctgactcctgactcctgactcctatcccctcacggaaagactttctcagcaacccctaattggcattatttcttcatgcaactaatgaaaaaactcagaaaaccattattcattatttacttgacgattaccattatcattagcagtattatcagtatattcttcagtaatattgcctcagcaacagttaaaataacagatataaaatttattggtgcagccaccttacccacaggatactctttccaaaaaaccgaactaggaggattatcaggaattacttatgatgctaaaaatgatctttattatgccatttctgacgacagagggcaaaaagcacctgctcgattttataccttaaaaattgacctcagcacaggaaaattaaccaaagatggagttattcccgtagctgtcaccaccttattaaatgaaaataatcaaaaatttcctcctagtgaaaccgatacagaaggtattgctgtaactaacaaagccactgtattcattgcttctgaaggagatgtgcaaaaatccataaatccttttattaaagaattttctctatcttctggccaagctattaccagcttacctataccggataaatttttaccagatccaaaaagtcagcagggtatacgtaataacttagcttttgaaagcctcaccatctcagaaaataatcaattattatttacagcgactgaaaacgcactcattcaggatggtgcagcggcaaaacccagctttggtagtccttgtcgcattgtgcaatataacctagccaccaaccaaccggaaaaagaatttctgtatatcacagaaccagttacaccgctattcaattttacaggcaggtttgacagtggattaccagatttactttctttagataatgaaggacatttactgagtgtagaaagaacttttacaggtttgggatttgcgatttctttgtttcaggtttccctagaaaatagcgatgatattcataatattaacagcctttcaaacattgacatcaacaaaatcaaacctgtagagaaaaaactactcttagatttacagactctcgatgtagctttagacaacatagaaggcttaacccttggtccaaaactacctgatggacaaacttccttaattctaatcagtgataacaattttaacaaactccaaagcacccagatcctagcctttaaactcaagctagaatcacccttaaatcgcttattgcgtctgctacgaatctctctatagaaacgaatcgggagccacttctaatgattccctcacagaaagacttttatgcctacggcaccctacgcgaacagcaacccctaattaagtatttttacgtctatggaaaaaatacgaaaatatgttacatagaagaagataactttaatcaagtcaatcaaattgattgatatcaattcacaagattgagcagctatatcaatacttatttgtgagtgtcaaattttacatatttaattttccgagatatcttttatagcaggagtcaggagtaaaaccctcttgtagtgagaggttcatgattaattgatgtcctaactactttgtctacggctatatagttgtatagatgaagaaaaataagaaagagttgtaataattttgctaaaatatcctgtagaaaatatacatattaatcttgtggtgtaacacaacaaccaggatatgaatgaatccaaaacatcatctgacatttacattgggcaactaataaatcatcgttatttaatcagagatttacttggtgtcggaggtatgggtagagtttacctagcagaagatgttaccaaggaatgtatgctggttgctataaaaatgctctccataaatatagccaataaaaatttagcagaacgctttgggagagaaatttttattggcgctcaattagggagaaaaagtcaacatattacccgtgtttttacttatggtataactaatgaaaaagtgccattttatgttatggaatatctgcgaggtagaactattaaacaaattctgaaaaatgaaagtttagatttatcaaagttttttgtaatctgcgagcaaatttgtttaggtttacattgcgctcatcaaggagtaagcctaaatggcaaagtttatccgattattcatagagatattaaaccagaaaatatattcatcaataattatggtaaaaaaacagaaatagtgaaaattcttgattttggtattgccaaattttttaccgagagtagtgggatgacaatgactgaatcttttataggtagtctaccttactcctctccagaacatatgcaaggtcaaagaattgtagatatccgttctgatatttatagtttgggtttgatcatgtttgaaatgcttactagaagacatccattttatacaacaagccactcttttagcacttggtgtagacttcattgtgttcaagccccacctacatttgaagaagttaatccccatgttcatgttcctcaagaattacaacaattagtcatgcgttgtttggcaaaagatgtgaaagatagaccaaacaacgtccaggaaatattagatgatttggggaaaattaaaactctggttgaacaaaaaagtttcagccataatgaaccaagccgagagtcgaatcattcggatcataatgttcaattagtacctttaacatcattttctgaacaagagtgttggcaaaagaagtggcctaaaaataaaccagtgggattaatttgtttcccacatcttttacatacaattagagggaatataccaacattttgggctatgttacctcaagcagaaattatgaaatttcaggaaaaaacacataatacccgatttattagtaaaatcgaagattatcccatgatattgtgggtaacaattttacatgatgaatctgatttaatcagatggttatcctattatttagatattcaagataatagagaggaaaaaatattgcgaactttagcaggaattggctattatcatctgctattttttgcctgtgaatatcctcataaatgtagtcatgttatgacttttatgctcacagccaaacagcgccaacatctatccgatgccatcaatctcagtttcaataaaaagaataaaaaccggatttctcctactcaggctaaaagtcttctcaaaatagaatatgaaaaattaaaagtcgaggtaaaaaaaaagattaatacaaaaacgaaaaaatcccaattttttctttcagcttggatggcaaaaatatttgatttatttaaattataatcaatctatagactagctgctaacagtgaaacgatcaaaaaaaacagtttaaaatttagaggttattgcagtgaacacaaaccctcatgcgtctccagaaaatcaggagttgctggccaaccgttatcaacttcaaaagttaatcggtaaaggaggtatgggtgaagtttttttagcatctgatgttttgcttggaggtacaccagtagctataaaatttttaacccagacatttaccaaccccacagttcaagctaattttaatcgggaagctctcctcagtgctgccttgagtcaaaaaagtatacatattgttagggcttatgattatggtgtgagtaaaagtggcaagccattttatgtaatggaatatctatcaggcaagattttgaaagaattaattcctgtacatctgtccatgtttctcaatcttacccgccagatttgtgtcggtttgcagtgcgcccataaaggcgttgcgatcgaaggtaaaatttatccgttagttcatagagatattaaaccagctaatataattgtgattcctgatcctattttggggcagttagtaaaaatcttagattttgggattgccaaatttctcaacactactacatccaacaacactaagggatttcatggaactttagcttactgttctcctgaacaattagatgcaggagacgtagatagtcgcgccgatatttatagcttaggtgtgatgatgtttgagatgttaactgggcaaaaaccttggcaaccagaaactaactattttggtgcttggtataaggtacatcactttgaaaaaccaagggcgatcgctgaggtaaatccatatattgaaatacctcaacagttaaatgatttaattatggcttgtctggaaaaaaaaccagaaaatagacctcaaaatatgggtgaaataattcaaatattaaccaatatagaaaagtctagcccacaaccaatcaccacaagtttagattacaaatcccattctgccagttccttagttccgggaacttctgcaaaaattagttatagttataataaactggtttggcctgaaaataaacccattcaagaaattgtttttccgcagttgatagatactgggaaaactgttgttgcggctctatacctcatgctaccccagcaagaaattaaaaatcgtgtcgataacaaacgttacaaccagtttgtctttatcacctccccccacccgatgctgctgtggatcactgttctctatcatcggcaactcggtcctaagtggttgccctgctatctagatatgcaaaatcctcataatactcagttagtatcagctttagctgctaataattcttactctttgattctctttacccttgaacccccccatcactgcgctaatattcttagcagtagtattgccacagcacagaaagaaaagttacaagcttgggttaaacaaagtgagcaattaccttcatcctctaaatctcataccagcaaaaaattgttaaagcagcagtacaagcaaatccaaactcaaatattggcacatctggaagctaaaagccagtccacaggttaggaggttggggagacaggcgaggataataacccaatcaatcaccaatcaccaatcaccagtcacctgtgaaaaaaaatttcaattttttctcccaactacttgacagccaaaaaagattaagcaataatagtatagttgagaaaaacgcaatcaactgttagggactgtagttcaattggttagagcaccgccctgtcacggcggaagttgcgggttcgagccccgtcagtcccgttgcaaaaacctaaaatctgattcctgggagaaaattttaaatatctctcaggaatgctgtttttaacagactgggaaaataacccatatcggtggtttacaaccactcagcacttgttaaattaataatgctttgtgagagagagaattaactgtgtctgtaagagttcgtattgctcccagtcctactggtaatttacatattggtacagcgagaactgctgtatttaattatttatttgcccatcatcacggtggtaagtttattttacgcattgaagatacagatttagagcgatcgcgtcctgaatatactgataatattctcagtggactgcgttggttaggcttaaactgggatgaaggtccatttttccaatctcagcgtttacacctctaccaagcagcagtacagaaattattggatcaaggtttagcttatcgctgctataccacatcagaagaattagacgcgctgcgggaagcacaaaaagccagaaacgaagcaccccgctatgataaccgtcatcgtaacttgaccccagaacaacaagcagcttttgaagcggaaggtcgttcatctgtaattcgctttaaaattgaagatgatcgggaaattgtctggaatgacctggtacggggtaaaatgtcctggcgcggaagtgacttgggtggtgatatggtcattgctcgcgcttctgctgaaggtattggtcaacctctatataattttgtggtagtggtagatgacattgatatggaaattactcatgtcattcgtggggaagaccatattgccaatacagcgaaacagattttactttatgaagctatgggtgcaaaaattcccgaatttgcccatacacccttaattttgaatcaagaaggcaggaaattatctaaacgggatggagtaacttcaatttctgactttcagaaaatgggttttactgcggaaggtttagttaattatatgaccttattgggatggtcagccccagattctacgcaggaaatatttacgctagagcaagcagctaaagaatttacctttgaacgggtaaataaagcaggtgctaaatttgactgggataaattagattggattaatagtcaatatatccataatatgccagttaataaactcatagatttgctaatacctttttgggaggaagcaggatatacatttactagtggtagggagcgtccttggttagagcagttggtaagtttaattgctgctagtttaacgcggttagtggatgctgttcccatgagcaaagtcttttttactgatggggtagagttcagtgaagaaggtagtcaacaactgcaacaagaaggggtgaaacctgtactgcaagcaattgtgacaacattggaaaatcaaccagaattttccgcagataccgcccaaagcatcattaaacaagtggtaaaagagcaaggtgtcaaaaaaggtttagtaatgcgatcgctccgagcagctttaaccggggatgtacatggaccagacctaattcaatcatggttattgttaaatcagattggtttagataaacaacgtttaaatcaagcaatagctgggtaactggggtgatggggtgatgggaaggaaaataaattcttacagcagttttcatgtctttagaccacagtaagggcgaagcattcggacaattaattatcggtttttacctaagactatcatcccaatgctgatgcttccagcacgcttcgcgaacgcccctacattgttgacgcgaaacctaaatcaaaatgtggtttatttacctgaaaatagctgtaaattcttctttctcaactcctattatctcagtcaccactcaccactcacaagtcacctgataactgcaaatatcgggaacttaaaatagaagattcttgtctttaaaattacttaaatataaatataattacaatgacaaaaaaatcccttaatctagccattagattatcgttgatgatagttacacttggtgtgacaacagcgatgaatagtattgttaatgcagaagaagttccgcctatttttggtgatatcaccattaaccgtcaattttcacctgatcctttgacagtcaggggaatgagtggaggttcagttccagcgagcaaagttaatggagaaactgaaactcctacaggttcatgtactgggtttgtagatgaggactcagatcacactctaaaactgctcagtaaatttgactacctaaaactacaagtggaaagtaaggccgacaccactataatgattcaaggaccaggtggtatttggtgtaatgatgattttgatgggaaaaatcctggtattgtgggagaatggttagagggtatttacaaaatttggattggttcttacgaaaaagagaaatattttccttacactttaaaaatcacagaagttaagtaatagttgatagttgatagttgattgggaaacataaaattgattacccagtccccgatcaccagtcagggtaagagcatctcaatcaggcttgacataagggcttttcggaatctaatgtagagtcaatgaaacaagaactgagaacttgaatcatgtaatcgttatccatagcagtgcgtttcattttttgtcgaagactacgtttataagtttgttcacgattaagagcattgagagcaatgcgtcgtaaaagagcaaaatttcgggggctgttccaagagcgaatacgacaagaatcctcagcaaaagtacaatcaagaatccagtgagcttggttctcaattccccaatgtttacggatggctcgacctaaaagttgagcatcactgggtaaagaagagagataaaattgaacctcacgagtagtttgattccaaagacgacgctcccgaacaaccatcactacactttggagtccagcccagattttgggttggtaaagttcaccaagagccgaaactggaacagaccaaacttgacggatttccgtacggtgatgtcctttttcaatgcggtggtcataactgacatcaataccttgaaaagagagtgaagatgctgtttcaaaccattgttttacctgattgtagagagttgggtgatttgccttgagtgctaaaacataatctgcttttttatcaataatcttgttggcaatttcggtttgagtccccattgcatcaatggtaataatagctcctgtcatatctaataactctaataatgccggaattgctgtaatctcattggatttatcttctactttcatctgtgccaagaccaaattttgttcacttgcccaggcaataacaacgtgcaatgctgatttcccttgatttcggtcgtaagaacccctaattgtctttccgtctatgggaattatctctcctcccatgtttgtcactagggtttctatccatctgctgaaacaacgatttaattcttcgggattgatgaattcaaatacccgtctgaaggtgtcatcggagggaattccatttggtaattccaaaaactcttctaaccactcctgcttgctgatgccgtagttctctatgtcttcccacccttgcgctccagctatgactgctagaattgcaatcactaagatatcggttagttgatgtttctttgttcgctctactctcttgtcttttatgtctccaaaattttccactaaactttgttgaatggcttcaatggatgccacctgtcttggctttacctgatcatgatttcttttcttggaagcacttgacttagtttcaaatcctgctgacataaacctttattcctagagttgaagggggggcttatgtcctcatctcactttttttgctcccatgtcaagtcaaatttttctctgctcgctgctgcttatcttgtttcttttgtcaagttcattttataccaaattagatgagcttaccctcgttgaggtaccagttcacttaggggttgaagtgaggtaacaatcatagatagatatcgcaatttctacaagaaatctatcatattttaggacttacgtaagatgtgactgaaaaccttattcttgcgtaggggtaattcatgaattacccctactttccttcccttttgcgtaagtcctgatatttgaaatattagtttcaatatcagcgatcgcactatcacccatcacaaacaacctctctaaaaactcttatcttcgtttcttcgttccttcgtggttcaatattctatgttttcgtattctttatattataaaccataattaactctttataatttaaaacattacgcataaacacagataaataaaactaaatatatttgatgattcagcgtggtttagcgtaaaatgagtatcagggagagcaaaaaagaaatcagccccaaacccttgatagataagcttttgggaagatttaacttttaatttggaattttcaattggtattagtatgagaattaggttaaatttaattaagattctagaaaaatttcatgaatctgccataagcaaactacgctgtcatggctgaaattacaaaatggatttataaacatccgttacaaaagtagtcatattggtactagaggcaaattaacagatgaaattttcttggagaattgtagcactttggtccgtgctggccttggtaataggctttttcttttggcaaggtacttttgccggtcaaccagcagataacagccgtaatgcagctaatacccgcatgacctatgggcgctttttagaatacttggacgctgatcgggttacaagtgtggacttgtacgatggcggcagaactgcaattattgaagcgaacgaccaagatattgaaaaccgcattcaacgctggagagtagacttacctgttaacgctcctgagttgatcaataaactcaaagaacataatgttagctttgatgctcatccgatccgcaatgatggcgctatctggggtttgttaagcaatcttttattcccagtgttgttgattactggtttattctttttgttccgtcgctctaataaccttcccggtggtcctggccaagcgatgaattttggtaagtctcgcgctcgtttccaaatggaagcgaaaacaggcgtaaaatttgatgacgtggcaggaattgaagaagctaaggaagaattacaggaagttgttactttcttgaaacaaccggagaaatttaccgcagtaggggcgaaaattcctaaaggtgtgctgttggtaggacctccaggaacaggtaaaaccttattagcaaaagcgatcgccggtgaagctggtgttcctttcttctctatctccggttctgagtttgtagaaatgtttgtgggtgtgggtgcttcccgtgtccgcgacttgttcaaaaaagcgaaagataacgctccttgtatcatctttattgatgaaattgacgctgtaggtcgtcaacggggtgctggtatcggtggtggtaatgatgaacgggagcaaaccttaaaccaactgttaacagaaatggatggttttgaaggtaatactggcatcatcattattgcagctaccaaccgtcctgacgttctcgactctgcgctattgcgtcccggtcgttttgacagacaggtaacagttgacgctcctgatattaaaggacgtttggaaattctcgaagttcatgcacggaacaagaaattagacaagagtgtttccttagaagcgatcgcccgtcgtacccctggtttcagtggtgcggatcttgctaacctcctcaacgaagcagctattctcaccgccagaagacgcaaagaagcaattaccctgttagaaattgatgatgcagttgacagagtagttgcagggatggaaggtactcctttagtagacagcaagagtaagcggttaattgcttaccatgaagttggtcatgctttggtgggtactttattaaaagaccatgatcctgtacagaaagttaccctcattcccagaggacaagcacagggtttaacctggtttatgcccaatgaagaacagggtttaatttcccgttctcaactgaaagcgagaattactggtgctttgggtggtcgtgcagcagaggaagtaatttttggtgctgcggaagtgacaactggtgcgggtggagacttgcaacagttatcaggaatggccagacaaatggtaacacggtttgggatgtctgacttaggtcctttatctttagaaagtcaacaaggtgaagtgttcttaggtcgtgactggacaaccagatccgagtattctgagtctattgcttctcgtattgatggacaagtgagagcgatcgccgaagagtgttatgaaaacgccaagagaattattcgtgaacaccgtgcagttacagatcgcttagttgatctgttaattgaaaaagaaaccattgacggtgacgagttccggcaaattgtcgctgagtacactgaagtacctgataagcaacagtttgttcctcaactgtaaaggttttcaataataggaaattaatggggatggtgtcaactgtccctatttttttgggaataataaaccgcagatccgtaggttgggtacaaagaaagcgcaacccaacaaaataaatcaatgttgatggttataattatagaaaactggtaacagggtaagaaatatgatacaaattattttggattcagaacaagagaagttattgcaggaacagttaaaaacaggtaaatataaaacacctaatgaagtgattactgatgctttaaaagtattagcagaaaaacaaaatctcaatcaagaaagtcaaaaaattacaattctttcgggagaaccagcacaaaaattactggaggagaaaattaaaatgatgcaggaactaaaaaggaattatcaaccagatccccacagacagaaattagctgaagaatttagccaattatgtcaagaaacccaggaattacacgctgttcatcctttaacagatgcagaaattgatgaagaaatagcagcttatcggagaggagaataatcattattatagatttttaatgaaattaaaactttaggtaatactgtaatcatttcactgtcattatttctagaattagtgataaattttcagaagagttaaatcaataaggtataatcataagatatgtttccaaatcaattagaaatacaagaaattgtcactcaattaaagggtttaccactatttaatttttctctatcatcaaaagagttatttcatagcaactttttagcctggatatgtgaaatgtatccgcaaatattaggtaatatatttggggattttttgaaaaataatgaagctagtttaacaaaagtttatagagaacataagaatattgatttaacattagagtatagtaatggagaaacattaattattgaaaataaagtaaaaagtcttcctgacttagaacaattaaaaaaatactctgataaacatcctgatgccaattttttgcttttaagtttagttaaacctaatttttcatgtttcttaaaatcagaaaataaaattattataaatcatgaacatcatcaatttatttggcactatttgaattatgagaatttatctcaaaaacttgaagaagtacaactagaaatttctgaaaacaatctttatcatggacaacttttagcagagtatatccaatttataaaacatctgcataaattatcatctttattctatattaatgacaatgacaattcaattttctataataaaaatatatatccattaattgaaattcgatttcatgatgtcataattaaacttcggtattcacaattagcagaacttataaaacaaagattaacaattgaggggttcaaaattaataattggcatgatttcaaacaaggagattttattgtaaaatcagatatggtaaaaaacaaaggtgtatgtgacttttagtattgtataaaaaagcaaaacacttgtttaaacaatggagaagcaataggtaataatatttttgtaggcattcaaattgatgatcttaaatttaatgtttctttgttgttttggactgacaaaccaataggtaatggtaagattatagctgaaagattattaaattcaaatatttggtttgatttatctcttattcctggtaattctaaagaatatcccacaggaagaaactttaaccagtataatcaaggtactatgttatatcggtataaaaatttagaaaagactattaccataaatgagattattgagctaatcatgaaatacctatatataattaaggagaaagaattagcaatagaaagaattatagataatgtattaaatatctcgtaacatcatgaaataatatcccacctcactgaaaaacaaaaaaataaaaaaataaatactttcaattgtatctaaatatataaactattcccagtttatctgttagcttccacacccacccggaaatgaatttctgggctaatagcaaaagtgcgttaaaacgcactctaaaaatagtcggttttaaccgacttcagcttttagacagggaatttattccctggcgataattcctggcaataattcccctgctctaatttgctaaaatctctacattatcggtgcgttacccttctctaacgcaccctacaaattatctttctacatcctcaatttccttcgcaacccccgcagttaaaacctcatttccagtagcagtaaccaacacatcatcctcaattctaattccaattcccacccaacgcggatcaattgctggttgatcttctgctggttcagtatccggtacaatatataaacccggttctatggttaaaacctgtcccggttgtaaaatttgcgggttttctccatgttgataaattcccacatcatgcacatctaaccctaaccaatgactcgttctgtgcatataaaatggtttatatttttcctcttctattaatttatcaatctctcctttcaataaacctaattctactaaaccttctgttaaaatccgcactgcttttttatgaggtgcatcaaaagcattacctggtttaacttcttctatcgcctgtttttgtgctgccaatactatttcatataacgctttttgttctcctgtaaatttcccacctacgggaaatgttctggtaatatctgaattgtaataaccgtaagcacaaccagcgtcaattaataacaattcgttttcttgcatctgacaattattttcaatgtagtgcagaacgcaagcatttcttcccgccgcaacaatggaaggataagcaggacccatacccccccgtaaacggaaaatgtgttctatttctgcttgtatttcatattcatatcttcccggtgcggtaatatttaaagcgtggttgtgtgcttccactgcaatatccgccgcttgacgcattaagtctagttcggttttacttttatgtaatctcaaactgtgtaaaactgtgctggtatcttctatccctgtgggtcctattccccgtttgggataggtacgcagtaaacgttggtaatgtttgataattttttcgttgaaattaccatcccgtccaatatgataatatatccgatctgctttttctaaatattgcggtaatttctcatctaactctgcaataggataagctgcatctgcaccataaatttcctttgcagcatccaccccgcaacgataaccactccaaacttccttttctttatctttgggttgcacaaacaaaataaactgatgttcttcgtgatggggtgctaacactgctaccgcttgcgcttcgttaaaaccagtcaggtaataaaaatcactatcttgtctgtaaacatactcgacatcgttgtgcatgactgctgtgggtgcgctgtgaaaaatcgctgttccttgcccaattttcgacattacctgttcacgacgttgccgatattctgatttcatagccgatttaccttcaaagatatagtgttgtttttaactttagcaaagttactcagtaaagtttgtaattgctaatctcaattattttagccaattttgaattactcagatccccgacttcttcaacggggatctaaaggtattgtcaacaaaacaggatttgatgcttaaattctgacattgatcaacaaaaaataaaagtttttttgattgctcatggataacttttaatttttcataattcatcattttcaacatctctaaaatatctataaacaataacaattgtccgttattttttttagtaaatgtttgttatttacagaatctttattttccataaattaaaactttatattaattactcataaaaacagaccatgcctagtaaatcaggattagatttaaatacaacaagttgggcggtagaatctcgccaaacatcacaagatttgacaagccctcttgatatctcactgcccggtggtggtagttctgcaccttcaccagcagattcattattgccccaaatgccaagtgatttacctacaaataatctacccacattaccacctttaagtgctaacccaaatcccaatccttatttaaccagtgccgccattgttccagatttcaatggtgatggaaaaactgataaaatgtgggtgaatgtccaaacaggtgaaattttagtgcgcctgatgaatggtacaacagttattgaacaggcttctttaggtacttatgacctatcaacctggagttataaaactgctgatttcaacagcgataataagacagatttcttattacgcaatgaacaaactggtgaaaatgtagttgtcttaatggatggaacaagagttgctagtttcctgacattagatagagttgatccaggttggaaagcagaaattggcgattttaatggcgatcgcaaaaccgatattttctggcgtaacaacaccaccggtcaaaatgctatttggcaaatggacggaacaactgtagttagtgccactgttttagaaaccacagatgtagctttaacagcaaccatcgttgactttgatggtaacggtagaagcgatattttctggcgcaatactaccaccggcgaaaacacagcttggtttatggatggtagcgaagccaccaaatacaatttacaatctcaagatgtctcttggggttattctcttggagatttcaacggcgacttaaagacagatattttgtggcgcaacactgcaaccggtgagaacaagatttggacaatgaacggtatttttgttaccgaaggtgttgttaacactcttggcgaaggttggactgctaaaattagtgatttcaacgccgatggtaaaaccgatatcttctggcataatgccacaaccggcgaaaacacagcttggttaatggatggtactagcatcagttctgaagccttcttacccagcaacacccctggttataccgcatctcttggtgactttaacggtgatggtaagactgatgtttactggagagatcaacaaacaggtgcagataaaatctggactatggatggaacaatcgctactgaaacacctattgctgatgcagataagctgactccagaatggtatacagcataagtgattggggactggggattggtgactggtgattgggaagaaaaaacttgatcctgactcctgtacgggcgaagcattcgggcgataaattatcaatttttatcccaggttgttttccgaatgcttcgcccctacgactcctggaacttctgactcctgactgttgctatatcaagattttcagaattaagaattatttgtaactaaaaattagcgatcgcacttttgatttaatctgactaaatctgaaaaaaaaggcgatcgctttttgtttgcagtcttgttttcaccaagttaaaattgataactcaaaacttgaatttccgtactttccggcaatgtaccagaagcaatattcaccgtatccccattattgcggcgcacattcacacccgacattaaattcagaaaatcatccacaggtgtaatatcacaactattaggatcagcggcttgagtgcgataatgggtaggaatcaccaacttaggatttaacacccccacagcttgttttgcttcttgggcattataagctttagcactaccacccacgggaactaaagctacatcaggacgacccatgaggattttttgttcaagagaaataggtgcagccgccccacctaaatgtaaaatattaattcccccctgagtccatttccaaacagtatttttaccaaattgtctgccacctttgcgatcgtgatctatagaaattccttgaaacttcaaacctttaaattcatacacacccggttcataaatcagcttaggatttcccggtagtccttccaccgcaccttcatctaacaattgactgctaatcattaccaaatccgctacaactttggggggacgataaccagcagtacaaccgagattccgaaaaggattgacgagaatttttacacccccaccagtaaacaaaaagcaggtgtgacccaaccactgaactgatacaccactagattgggcattaactggcaggtgagaactgaaattagtaactaaagcagttgctaaaccagcaccagcataacccaataattctcgtcgtttcatgaatcactctcttacctgtaattgttccagaaaatttctgagtaactgcttacccgcagcagttaaaacactctctggatgaaattggactccctgaatgtgaggatagttccggtgctgtactcccataattgtcccatcttccacccaagcggtgatttctaatacttccgggcaagtctcacggtcaatcactaaactatgatatctggtagctgtaataggattttctaatccttggaaaacccctactcccttatgagatactaaggaagttttaccgtgcatcaattctggtgcggaaacaattttaccaccaaatacttgaccaatactttgatgtcctaagcaaacacctaaaattggtaaactagaacccaggttggcaattacatctaaggaaattcctgcatcttctggacgaccaggacctggagaaattaccactgcatctggttttaaagccttgatttcctctacagtgattttatcattacgaaaaacttttaaatcagcagcaactgggaaatctacggctagttctcccaaatattgtactaaattatatgtaaaactatcgtaattatcaataactataatcacaatttgtacctaagacaattttagattttggattttggattttggattttagatttaggttggtaattggtaattggtaaaaaatccaattacatcaatcatatcgaaaattgcactgttagaacccctttaaatagcagtcatgattaaagctaataaagggggaagtaaaagtatagcagccactagcaaagctacaaaagcagataccagtacagccccagcagcgcaatccttagcgattttagctaagtcatggtaagtttgcttaactgttaaatctaccaaagattcaatcgctgtattcactaactccaacgtcaacaccaaaccgctagtgatagcaatgatagctatttctacaggttttaggtgcaaaaaaagactcaatgcgatcgcaaaagagccaacagctacatgaatacgaaagttgcgttgagtgtgaaaactatagctgattccagcccaagcatacttaaaactcacaaataaattagaggctatttgccaggaaaactcccgttctttagacacaagggttggtaagcgctttggtgttgctgatggggaaacttgttgggacatatactggagaatacaaatcttatcaggtggtaatcttgattaattttaagggtagaataagagtttgaggcaattttaaagaatttgtgacaataattttgtaatcatcgccacccaatgtcaatatcctgtctacatccgctattttaagttaacaataatacctaccgaatgtagtaaaattacttgtttttttaacatttccatcaaactttcctcatcaggatgatcccagcctaaaagatgcaataacccatgagccgttaaccaagctaactctgtggttaaactatgttcctgttgttcagcttgacgagcagcagtatctatagacacaatgatatcgcccaagtacaaaggttgagcagccagcatttcctcggtttgggggaagttgttttctaaggctgcaaaggctaaaacatctgtgggtttatcttgttgacgatattgggcgtttaattcttgaatttcggcatcatttgtcaaacgcagcccgatttcataacttaaagcctgtggaagttcaggagtgagaatttccagccatttttgaaaccagctttcccagatgttttccgctacaactggggaagactcttgatcacagttttctataaatatttcaaatttagggggttcaaatttagggggttcaaattgagaaagcacgcaatcacctttgttagcgagtgaggtaagcaagaccaactaagacagctaacaatcctacagcagttagtccaaaatgtttgagggatgtgccaccttttcttaccatgtttcgcatggctagtttgacgtagctgggtttgggttcgtttgcaggagtattgctcatgattttttgattcatctgtctacatataactttacatcatttgggcattgggcatggggcattgggttattcatcctcccagtcaccagtcaccagtcaccaatcaccaatcacctaaccctctaccaattgattttcttgccgcagataggcttgaatgaaagcatcaatttcaccattcatcacgtcagtaatggcggttgtttccgtatttgtacgtaaatctttgaccatttggtaaggatgaaagacatagttacggatttggttgccccaggaagcttctaccatatcaccgcgaatttcggcgatttcttgggcgcgttgttcttgggcaatgactaataatttcgctttgagacgggctagggctttttctttgttttgcagttgagaacgttcttctgtacaacgcactgctaaacctgtggggatgtgaactattcgcactgcggtttccactttgttgacgttttgcccacctttaccaccagaacgagatgtagtgatttctaaatctttctctggtatttccaattttacagagttatctatttgtggcataacttccaccccggcaaaactggtttgtcgtttaccgttggcgttaaagggggaaattctgactaggcgatgagtaccagtttccgaacgtaagtaaccataggcataacgacctgtaatttctagggtagctgatttaatgcccgcttcgtcgccttctgattcttcagctaatgtgactttgtaaccgtggtcttctgcccaacgggtatacatccgcatgagcataaatgcccagtcttgggcatctgtgccacctgcaccggcgttaatggttaaaactgcaccttgagagtcataaggacccgatagtaattgttgtaattcccactggtcaaggtcacgatttaatttagtaacggtggtttctgcttcttgtagtagtgcttcgtcggtttctagttctaatagttcaacgactgcttttgtatcttctagatttgcttgccattgataatactgatccaggtgagatttcagatcgttgagttcttgtaatgtttgttgtgcctggttttggtcgtcccaaaattctggctgggctgatatttgttctaggtcttgaattttggctttgagtgcaggtacgtcaaagatagtcctgggttttacccaggcggctagacaacgtttcgatttcgcgtttgagttctaggacttccatagttgaatcaagttttgggcgaatagaaggcgcaataatatggctacatttaccgtacagtatacgctactacacaaacaatgtctaccagagtggactggtgagttgagcgatcgctgttgatatttttgattttagctgtagttggagaatttttgggaaaaccgctggtgttaattaccgaatccacagttaccaacaaattaaatataagtttttcttaaatataagtttttcacacgatgtgacattttattaggtattttacgctgtcatacgttattaaattcttcaaatctatacttccgccaatgctgagaagttaggtggtttctattgtttctcaagattatagttcatttgctggttttaccgcagctatgggagattatttacagcttattcctttattatgaggtacatcatcgccccctcatcgcttgcggggagggggttgggggtgggtttcttgtacggtaacagagttgaaagtaaagtattttatagaaattcggttgttttctagagataattgaaaaaccctaattttgcactgtatgttaataagttggctttacctaattatagcaattctgtttgaagtttctggtacaatttgcatgaaactttctcaagaatttactaaaatattaccttcaattttcatctttgtattctatggactttgtttaacttttttgactctttctctcagaaaactagaagttagtattgtttatgcagtatgggcgggtttgggtactgttttaattagtattattggtattgtttggtttcgtgaatcttttacgctgatgaaatttgtatccatagtattaataattgtgggtgtgatcggtttaaatttaagtgaatatggcaggtgatagggaacagggaatagggaatagggaatagggaagaaatttattcttattatcctgactcctgactcctgactcctgactcctgactcctgactcctgactcctcctatattaaatttgcaacattccctctggattaactgttaaaagtgttcgttgctgcaaaccttcacggtgtaaaatttcattcgcagctagtaaaccactactcacagcccgttccattaaaccacaaggaaaaggcatttttacccaatcacctgcaaaaaataaattagttaaagttgtggtagtttctggacgttctgtataactattaggtggatatccagaaaagttatgttgattaactaattctcgatgtaataatttggcttgttttaactcaggaacaatatcataaagttcctcttcaaaagttgttaacaaagcttcttggttaggaaattccttttctttgtaacagtaagcgtgtaattctactacacttcccccggttttttttgcccattcaataaattgggtttgaatgcgatgataaagagtaatactgtcagttaatttgtaaccagataaagatgtaaaattgctatgttcccaattaaaatcttgatcaaaccagaaacgacaaacagcaaaaggatcagcaatacttaatttttcaatttgcgatcgcacttgtttcacatttttatctatatccccactcatccgtttaaataattgttttactccgggaacatccgtagctaaaacataataatcagcgttaattatttctggtgatgatgactctggattaactgctaaaagttgtaaattatcatcttctttttgtactactttaaatttagctaaatctctttttgctggtcctttaaccacttttccatctgctgtaaatacagcaccatgacaaggacagtgaaattgtccatcctctgccattttcactgtgcaaccttgatgggtacaagttaaagaaattgcttcctgattgtcttttttgacagcataaacttcatcagcagcaccaaaatattctatcttttcatccttgacaactgaattacgctgcacccaaaaaggcactgtatgattattgtcacctacaaaatatttaacttccgatattttaccttcattcgccacaatttcactcacatttgcatctgtaataatttttccattttgcaaaattgcctcagcaataggttggactaaacttgtccccatatcgtcttttgtaccattaaaagctagtccttcaggattaccaaaaaagtaaaaatggaaaaactgcattaattccccaacactcattaaatctggtgcatttaaactagatttagcaaaaggaagaaaatacaaatcatataaaccttggggaaattcactcttcacccaatcagcaacagatatattatcaaaacgctgataatttttatctctttgaaaacctgtaattgcttgaaatacttgtaaatgcttaattttggtgagatttattccccattgtaagcgattaggagaagcaatagctaagtcgataatattccaaggaaaagcagaatgactaggacgaaatacctccggttgatatggagaattgtggtaaactacagaataataatttaaggattgaaaattatcttttatccccagttcagaaactacactatttaagttataatactgtggaaaaaaaccatgaaacccatgttccattctaaacgtttcacccgcagcttctatttcccaactggcaattttcccccccaattgcggagatttttctagcaatgtgacagtgaaaccccgttgcactaattgatatgcacaagctaaaccagctaaacccccaccaattaccgcaacagttttgttagtatttaatatcttgggtaaatccagattatctggttgaaagacagaaggctttggtttactaaaacgagagtaacctgtaactcccactatcgtacccacaccaaacaattttagcagtgtacgccgagaaatggtagatgattctggtaaattaaatagttggctcattggtgacacaattaaattctcaattcaattctcaattcaattttcccgatgtctaaaagcgtaaattaaacgccatcaatgtgaaaattacaagattctttgatagtgtaatatatgatctattaattggctactctgtatagataacagggtagacttagtataatatagattttagttaaatttgcaattccttggtcaaattacgagagacaagtaccttgaagagaatgtttgaaaagtcggagaggtagtaaaaaagattttttagtataatatataactcaatattacatagcacacctgtgagcaatatggtgtgtaattgattagactgggaaatgctatattgacatctagccttttatcactagttatactaaaaacggatgatttctagacttttacccaggcaaaaatctttgtatagcaatactcttagcgatttaaatagtaagtctgtaacccgtttttagtatatacttaaaattattgaagcttttcagtttattttgccattacttcagatgatttcactaccagatatcacaattatcagccaaatttacgaaagtgctaattcactcgtataccaaggcatatttaatacaaatcagcaacctgtgattttaaaacttcttaaagaagattatcccacacctgctgaactttaccgctatcaacaagaatatgaaatcactcataatcttaacctagcgcaaacaattaaagcttatgagttgagaaaataccaaaatactctgctcatgttattagaagattttggaggacaatcattaaaaattctcttgaaagatgatcatttttctttactagaatttctcaatctggctattgagattacagatattttaggaaaaattcatcaaaaaaatattattcataaagatattaatccatctaatattgttctcaattctcaaacaggacaattaaaaattattgattttggtctatctactcgtttatcccaagagaatattagcccacaaagtccgaatattttagaaggaacattagcttatatttctccagaacaaacaggaaggatgaatcgtccccttgactaccgcagcgatttttattctttaggagtcactttctatgaattgttaactaatcaattgccctttacatcttttgaagcaatagaattagttcattgccatattgctaaacaaccaatacctgcttattttttagttaaagaagcaagtgaaatccatcaacttatatctgatattattatgaagttgatgtccaaaaaaccagaggacagatatcaaagtgcttggggaatcaaagcagatttagaaacttgtctgactcaatatcaaaacggtactctccaaagatttactttaggatatcaagatatttctcctcaattacaaattcccgaaaaactatatggtagagaattgcaaattgagagtttattaacagcttttgagcgtaccagtttggggcaaccagaactgatgttaatttctggatattctggtatcggtaaatcagctttagtccacgaactttatcagctaattactgaaaaacgcggatattttattagtggaaaatttgatcagctacaccgtgatattccctatcaagcgttagttgctgcgtttcaagaattagtgcgacaattgctgacggaaactgaaatacaattacaacaatggcgagataaaattttatctgcattaggaggaaacggacaaattattattgatgttattcccgaagttgaattgattattggcaaacaacctactgtactggaattagctcccacagaagcacaaaatcgctttaatttagtttttcaaaactttattcaagtattttgtcaacaagaacatcccctcgttatattcctagatgatctgcaatggacagacagtgctacattacaattgctccagttaatcatgactcatactaatactaaatatctgtttttaattggagcttatcgagataacgaagtcagtgctactcatcctgctatgctaagtgtagcagaaatgaaaaagcaggggttagtagttaatcatatttccctttcacctttaaattttcatcaagttaatcaatttattgccgatacactcaaaactagttgtaaccatacccaaaaattagccgaattggttggggaaaaaacccaaggtaatcctttctttatcaaggagtttattaaatcactttatacagagcaattgctaaaatttgatatccctactggtatgtggtcatgggatttagaacaaattatcaatagtagtattactgataacgttgtcgaattaatgacagaaaaaattcaaagattatcagatgcagcccaaaaagttttacagttagctgcttgtattggtaattcttttgatttaaaaaccctagcagttatcaatgaaaaacctgaaaaagaaatggctcaggaattatgggaagcgatggaatttggattgatattacctattggtgatgactacaagtttctacaaacagatagagaaactaatgaattgaaaattatttataaatttgcccatgaccgcattcaacaagctgcatatttcctcattcatgctgagaaaaagcaagctgttcactggaaaattggacaacttttattacaaaatacttcacaacaattactctcacaaaagatttttgatattgttaatcagctaaacttaggtattgcagcaataaatgttaaattagaacgagatcaacttgctcaattaaatctcattgctggtaaaaaagcgaaagcttcagcagcttgggaaactgcgggaaattacttcagaattggtagaaattgtttgagtttagatagctgggaaagtgagtatgatttgactttggagttatatgtggaagctgctgaggtagccagttcctatggcaattttcaggaaatggagaatttagccagtatagttttacaaaaggctaattctttgctagataaagtaaaagtctatcaaattaaaattcaatcttatacatcacaaaataaacccctacaagctattgaaactgcactatcaatattaaagatgttgggaattaacctgccccaaaaacctcataaagtagatattttactcaagttggtaaggacaagattaaattttgcaggtaaacctattgagaagttaattgatttaccggaaatgactaatctttataaattagcagcaatgcggattttatctgatgtaactgcggctgcttattttgcaatacctgaactttttgctttaattgtgtttgaacaggtaaatttatctctgaaatatggcaatactcctagttcttgttatgcttatgctacctatggattgattcttgcaggggaagttgtgggagatattgaatctggctatcaattcggtcaacttgctttaaaattattagataaattcaatgcgaaagaactgaaaccaagagtattttttgtggttaatttctttattagacattggaaagaacatctgcaagcaactttgactcctttacgggatgcttatgtaattggattggaaactggagatttggaatatgctgcttatgcggcaacttcctatactcatcatgcttatattctgggacaggagttaggaaagttagaaccagaaatggctatttatgctaattctctcaaacaattaggacaagaaactggttattattatattgccattaatcgccagttaattttgaatttaatggggcaagctgaagataactgtcgtttaattggtgcaagttatgatgaggagaaaatgttgccgattcatcgtcaagctaatgcccaaaatatttgtcattacctttatttttataagatatttctgggttatttatttgcaaattatcaacaagctatagaatatactcagttagtggaagcatctcaagatagtgctgtaggtagtattcctttgtcagatttttacatatctttaatttacttggctatatatactgatgttgttaaatctgaacaaaaacgcattcaaaaactggtaaaagctaagttaaaaaatattaaaaaatgggcgcgttttgccccgatgactcatttacaaaagttctatctggtgcagggagaattgcatcgagtgttgggggaaaatattaaagctattgattgttatgatttggctattgctttagctaaaaaaaatgattatgtgaatgaagaagctttagctaatgaattggctgctaaattttatctaaattggggaaaagtgcaggttgcccaaggttatttgattaatgcttatcattgctatttgcgttggggtgcaactgctaaagttaaggatttagaacagcaatatccacaacttttacagcgatttactaaaactaatatgtctttagattcacgtaatagtttacctagtacctctggtagtaacgccggggaagtgttagatttagtagcactgatgaaggctgctgtagcaattgctagtgaaattgaattggataaattgttgatttctttgatgagaattttgttatctagtgcgggggcgcaaattggttatttgattttggaatctttgggagaattacgagttgaagcgtctagtgaggcaaattctgaggaggttttagtattacaatcaattcctattgaatcttgtttacctgcatctattatttattatgttgctagaactaaagaaggattgattgaaagtaatgttgctcgtgaaggtagatttacgcaagatgtttatattaaaaaatatcaaccaaaatcagttctttgtgcgccattgttgaatcaggggcaattcattgggattgtttatttagagaataatttagctgatggtgtttttacaccggaacgtttaaaaataatacaaatgctttcgacacaagcggcgatcgctctgaataatgctagactttatactcaattacaatcggcacaaaatcgcctgaataaattccttaatgctattcctttgggtatttctgttcatgatgctaaaggaaaattggtttatactaatcaagtttcccagcagttattccaaattcaagagttaccaaaagcagaaattgaacaactttcacaagcctatagcatatatcgggcagaaactaatcaaatgtacccagtagaacagttgcctattgtgcgctctcttggtggcgaaaaaatacgggcggatgatttagaattacattctagtgagggaattttacctttagaagtcaccagtacgccaatttttgatgaaatgggtaatgtggaatatgcgatcgccgcctttcaagatattagcgatcgcaaacaagcagaaaaaaccttgattgaaaatgtccgtttagaacaagaaattaacgaacgcaaaaaaatagaagcagaactcgaacgggcgaaagagtctgccgaaactgccaaccgcgctaaaagcacatttcttgctaatatgagtcatgaattacgaactcccctcaatgctattctcggtttttcccaattcatgaaccaagacaaaaatctatcaaatgaacaaaaaaataatcttgatattattcatcgcagtggagagcatttgttgacactaattaatcaagttctggacttatctaaagttgaagccggacgcataattttatccacagctaaattcgatttgtattacctattggctgatcttgaagatatgtttactttgaaagccaaagataaaaacttgcagctaatatttgagcgatcttttgatgttccccaatatatccacactgatgagattaaattacgacaagtgctgataaatttaataaataatgccattaaatttaccgactttggcagtgtatctgtgaaaattggacttaacaaacagatagagcaggatcagcgagaaacaacaattacctttgaagttgcagatacaggaattggtattgcggttgaggaactggagaatttatttcaaccctttgtacaaacagcatcgggacagaaaatacagcaaggaacgggattaggattaacaattagtcgtgaatttgtacgcttaatgggaggtgaaatgactgtcattagtggtggtaaagtcttcacccctggaacttctttacctgtctgtgacaatacattaaaaaatgtggatataatttcttctttatcgtcctctggtactacttttaaatttgatatattagtaggcattgcggaaacagaagaaataaaaaataaacctcagcgcgatcgcattattgccttagcgcctaaccaacctcaatatcgcattttggtagtggatgatcaagactataaccgccaactgttagttaaacttttacaacctgttggttttgacgtacaagaagctaataacggtgaagatgccattaaaatttggcatgaatattcaccccatctgatctggatggatatgcgaatgccagtaatgaatggttatgaagccacgaaacacattaaaagcacaactcaagggcaaaccacagttattattgctgtaactgccagtgcctgggaagaggaaaagactataattttatcggctggctgcgatgattttgttcgcaaacctttttacaaagaaaccatatttgagatgatgggtaaatatttgggagtccattatatttatcaagaaaaagagccactttctcagcctgataatttaattatagaatcattaagtttaactgagttattagcagctatgccaaaatcatggattgtaaatttgcatgaagccgcccttgatgcagatgtagaattagtctcgcaaatcctagaatcaactcctgaatctcatactttactgcgtcaaacttgccaagattgggtgaagaagtttcaatttgaaaagattttggatttaactgaatcattactcattttataaaaatcattttaccaaagagcgatcgcctttttcattatgatacttttaacccacagcatagtcactcatttccctcatgaaagaaggatggaaacctagtacaatatcttgttttggtacacccaaagcaaccaaatctgctgcaatatcatgctccgttgaattgtagaaaatccagattttttcattacgaatatcaagatgtattacacaatcatgcacccatcgctgatgctgccaacctagatagggcttgctgaataaatgtgaaacccagataaatcaaggggttggggacagctaaaaaagaaagtaagtgcaagatttttgagggggatactcccaaaagcgtgcattttgagttgaataagtcataaaatctagggataacagatagcccaaactcttgcctgcccccacaaaaagactttttcagcaaaccctagatagacaatttgatagtgatttcgctgcgtatcaaaaatagtctcaacttcaatctctccataagctggcttaacttctgcataatccatcaacaattgctgtacaatttgctgatagttccttaatttatctgttatgtcttccatagtgaaatttgctccaatttaatattggaaacagataaaaattcttattttataagcattttaggctgataaaattctcacttattatttaggattgccatatagtaattttacaaatttacaggataccatgcctattttatcaactttaatcaagcaactccatatttggtataaggacgtttgtatgggggatgcaagcctaaaacaatatctgtagctggaactcctctttccaccaactcttgagcaatatcagcttctgtcatattgtgctgaatccagattttgttgtctttaatgtctaaatgaatgtaacaggaataaatgcgatttaagtcctgccaaccaacatctagaatttgataatgatcatgttctgaatcaaaaatgagttgacattcaatatttggctcatttggggtagcatggtctgttaataattcccggataatttgacgatatttatctagtttgtccatgcgattatctcctcagtatcgggtttatatgctattatttttaaggcatattttgaaattgctgcttgagtaaaacgctcctgaaaaaaagtattaaaaatatcaataggaacggctaaatagaggatacgctctggctctgtcatttccaaggcaagacgataattaagaaactgacctagcgcattatgaaaatcagtaattgcggaagtattgataaagcttttaacttctaccgcaattttttggtcatctttttcagccgcaaatactttttcagcagctagatcaatttctagtttaacacggtcaatccgaatgattaatgggtcgcctgtaatagtccatccgtctttaattaaagcttgcttaacggcttcgtggaataagtctttggccatactgaaatatctacaactcttttccaatacataatgtacacactacaccctatcctcttgctatgcaaatttacgaaagtaccctacatttcttcatatacaacttgcacaggtaacttgaacagcagcaatagacattcagagcaaatatcgttcgttatttatcaaaaatgctgttctaaacctctttaataaactgttgaaattcccctataattgtcagtaaatcgttatcaagttctcgtttttcttgttctttagtgataggacgaaacagcggatgaccacgactatcaaaaccaatttttcaatatttattgcaacaaaatggagtttatgcacaactttggcaacaaagtcatcaagcacataattaatacataattaatacataattaatacatagttaaatagatggtgtagatatttccttatatttaccccctaatctttcacctcacgcacagtcatcgaaaagccatctcctaacttaacagctatcaagtcataacatttcttttgcatattggtttcccaaaaaaaattttcttcaagtctttctcctgtttccactacctggattaactgttcaaaaaaaccgggaatgagttgatttaagaatttcttttgccctaaattattagtcaattcttctctctttttacccaagattttcgcatagacaggattaactaataaatagcgaaagtcttcgatttctccagttatcatatctctcacggcttgcatagcagcaattccatctctggaactatttaataaactggcgagaagggcgcgagattggtagagaatttctgcggtttgctgatgtttctcaatttcttgtcgtaactggtgtttttgttgttgtaaagtgatttgagtttgaatccgggcgatcacttcttcagtttgaaatggtttggtaatataatctactcctcccacctcaaaagctttgactttatcaaaaacttcgtttaaagcactgagaaaaataatcggaatatctgaagtttctgcttcagctttcagcattgagcagacttgatagccatcaatatctggcattttgatatcaagtaaaatcacatctggagggttattgcggacggttcgtaatgccatattaccgttggtaacagtgcgaactttatactcctgtttagttaaaatatcatataaaaaatgcagattttcgatgaggtcatcaacaattaaaatattacctttggggtcttcagtttgataagtttccttttcgacaatgtttatagaagattgagtagaggcagcgtttcgttgtaaaagtaaattgcgaaagttacttttgttgactttttctcccattaagtcggaaaggcgtttccataataatgaggctaaatctttaatatgccccacacttatgtataaactatctgcaacagcattataggtttcattttcccaagcagctttgaggattcctttctctggaaaggttagttttttacctgttttggattctagggttgagtctacccattggattgcttcttcaagattcatcagtagttgaatgtcattttttagggtttttgatcatgctattttgtagtttattttacagatagaattgcaattagcgatcacagctacctctagtaagtgtttatatatgtaaatgttggctactttttcagttatattgaccgtcttttctcttcatttctttccaaagtcaaatagatttatctataggatttgtatatcattacaattaactattcatattatacatttctttcatcagacgctttaccacttacttttctgatgaattatatccagcgttggtctcactatcaatacctttaaaagtattttagataaaaccagacttgatccgacctcaagatccgacttttccgactagcacgtaggatcaaagggtattaaatttaagaggatgtttgaaaagtatcagaattaatcgagatccccctaacttacaagggtaggttttttacattgtcgtgagggcaagacttggtggacaaggtgacaagggaggaaaacagtacaaagtctgtatttttagtcacaaaaatagtccgtcaaaaaaccattgtccgtataaaatcttccttgtccatcccttcgactacgctcaggacaagccttccttgtcttcctggtcttgccttcacagatcatattaaaaacctacccctgtgatcccttgaaaaggggggctaaattcctcaaagtccccttttttaagggggatttagggatatctgcgggtgtcaaatcccacacgaaaaagttttcaaacaacctctaactgccgcatcgtcgtcactttgatttttggtagtaagcattgcaacaatgttaggatatcgaacatgggctgtttgtgactttcgagttgtttttttggaagattataactctactacatcagtcctctcttcatactctttttttgaccaaggtattgatttgtaaatcagattatcaagatgaaatattggcgtgaaactatagctgtaactcagcgcatcttaattgaactgttacgacgcagacgcagcttaattttttggagtattttccccatctccattttaattctcaatggatttattttggcagaacgggcaaaattaaccatgtctgaagctttggaaaatgctgcaccttcaactttggtaggtgctgcactgttttttagttgtttgggtggaagtgttgctactgtagtcgcagaaagagaacagcaaactctcaaacgcttgtttatttctccgttaagtggtacatcttattttttgggaatttttctcgctcatagctgtattggtattggacaaactcttttagtgtatactatagctgctttttggggtgctacttttcaaggttcgattttcttaggaattatcatcattttattcagcatcattgcttatgttggtttaggatttattttaggtacacaattagctagacgcattgaagatgttaatgctttggtggctgcttttggtgtacctttattaattttgggtggagcatttttaccaacttctttatttccccaaactctgttaaatattgcgagatttaatcccatttatcacatgaatgaagctcttttaggagtgtgggctaagggggaaaattttcataatatcattttacatttgtggtttttattctggtttgccatgattatgttagcctgtggatgggtatcttatcaacgaatgttgatggtggaaaggaagctttaaagcaattgataattgataattgataattgacaattgtttcattcaaggtttaaaacctctcctttgaaggaaaaaaagaaaaaaatccgctatgtaatctataagtatatcaaacaacagatttaaattgaaaatatgctcagaattaaaaatttaaacaagtcctacaaaagccgaaaagtgctgcaaaatttaacattcagtattcagccaggagaagtttatggtttattaggtgcaaacggagcaggtaaaacaacaacaatcaatattatttgtaatctcctcaaagctgatagcggttatattacaatcaatcatcaaccgatttcggaagcaacaaaaaaattaattggtattgctcctcaagaaaatcttttatataaaaccctttcttgtgcagaaaatctgcaatttttcgctgacatttacggtttagatcgagaaaccaaacaacaacaaatagaagcaactctcaaatctgtaaacttattagatagagctaaaagtcccgtagaaactctcagcggcggaatgcaaagacggttaaatattgctgttgctttagtacatcaaccccagttagtcattcttgatgaacccactacaggtttagatattgaagcacgatatgaaatttggcaattaattcgtaatcttaaaaatcaaggaatgacaattttattaactacccatttattagatgaagcagaaagactttgtaaccgcattggtattttgaaaaatggtaaaatattagcagagggtagtttatccgagttaaaaactttaattcccggacaagaaattgtcatgttacaaacaacacaagaagaagaggcgatcgccctagctcaagaatataatttcataccccgacgttatggtaatgatttagcttttttactaccagaaccgttagaattaaaagaaatccttgctaaatttgatagtatacccattgattctatttcccgtcaacctgtacgcttagagcatatttatgtagaaataacccaagaaaaattgaaaattgaaaattgaaaattgaaaattaaacccaatcaccaattaccaattaccaatcatggatattttagcaacacttaaagccgactatcaaagatttccagttaatcaaacttacagcatttatgcaaaggatgtttattttcaagatgctgtatttaaatttcggggtttagaactttataaatggatgattaaattcattcaaacatttttcctcaacctcaaaatggatttacataatattcaacaacaagaaaacacaattaaaaccgagtggacacttagctgggatgctgcattaccctggaaaccaaggatatctatttctggttggagtgaactacgtctcaataatgaaggtttaataatttcccacattgactattggcactgttcccaattagatgtactaaagcaacacctattttccagaaacaaaggataatgtaaataaatgtaaacaaaattcaggtaggacagaatcattcatgcgcgtaattttaatgacaggtaagggaggcgtaggtaaaacctccgtcgcagcagcaaccggacttcgttgtgcagaactcggttataaaacattagttttaagtacagatcctgctcactccttagcagatagttttgatctagaattaggacacgacgcaaaacaagtgcgcccaaatttgtggggtgcagaactcgatgcactgcaagaattagaaggaaactggggtgcagtaaaacgttatattacccaagttttgcaagcacggggtttagaaggaatacaagcggaagaactggcaattttaccaggaatggatgaaattttcggtttagtgagaatgaaacgtcattatgatgaaggagaatttgacgttttaattattgactccgcacccacaggtactgcattacgtcttctgagtttaccagaagttggtggttggtatatgcggcgtttttataaaccttttcaaaacatctccgtagcacttagacctctagttgaaccgatttttaaacccattgctggtttttctttaccagataaagaagtaatggatgcaccctatgaattttatgaacaaatagaagcactagaaaaagtattaactgacaatacacaaacctcagtgagacttgtcaccaacccagaaaaaatggtgattaaagaatcgctccgcgctcatgcttatctgagtttatataatgtagccacagatttagttgtagctaaccgcattattcccaaagaagttgaagatccatttttccaacgttggaaagaaaatcaagaacaataccgccaagaaattcatgaaaacttcctccctttacctgtgaaggaagtacccttattttctgaagaaatgtgtggtttagctgcattagagagactcaaagaaactctctataaagatgaagatccaactcaggtttattacaaagaaaccactattagagttgtgcaggaaaataaccaatacagcttagaactttatttacccaacattcctaaaagccagattcaactgagcaaaaccggggacgaattaaacattaccattggtaatcatcgccgtaacttagttttaccccaggctttagccgcactgcaaccagcaggggcaaaaatggataatgattatctgaaaatccgctttgctgacggtgtgagagtttaggagatagttgatagttgatagttgatagttgatatttattaactgtcacctgtcacctgtcacctgtcacctgtcacctgtcacctattccttaacgataattctgcggaagttcagcaaaaaatgaataatcgttaagcccataccttgaccgtactcccacggaagacaaagttatcaaaaaacaatttaactttaattaaaaataagaatagactataattaatgtatgaatagttgtataaaaaatggtttccgtccctccactagacctgcgaacaggcatggctcaagaaacgttactgcgtaggattacaaatcgtatccgtcagtccttggaactagaagacattattacagcaaccacagccgaggtgcgttctttgttgggaactgaccgagtaatgatttatcaatttcatgatgatggtagtggtgaggttattgctgaatctatttatgaaaatcgtttaccgtcattgttggggttgaattttcctgctgatgatattcctcctcatgcacgggaattatttattaagtcgcgggtgcgttctgtagtcaatgtagactcaaaagaagttggccaaagtcctgtgcgtaacctagaaaccggagaaattatttctgaggatcttctttaccgtcctgtagatccatgtcatatagaatatttgacagctatgggggtaaaatcttcagtagtagcaccaattatttatcaaaatcaactgtggggattattaacatctcatcattctcaagcacgtgaagtagcagaatatgaactagatgcaatgcagatggtagttgagcaagtatctgttgcgatcgctcaaagtaatcttctcacccaagcccgtgccaaagcagaaagagaagctattattaatcgtattgctacactactgcattcactaccaacaatagttttacaaccagctttagaagctacagttgcagcctttaatggtgttggtggtagattatgtattagacataatgcctttgacttacaacatagtcaatttaaatctttaagagaatgtttaattcctggtagtaattgtctccagctttatgtatgtggagagcaaccagttattcccaacccaaatatatatccatttttagaacaatatagcgtttggcaggaacattataaatctggagaatatgaaatttgggcaattaatgatatctaccaagattctaatttaagaattattcaactagcatttaaacccacaaaaattcgcagtattttaatgattcccctgcactatcggcaagaattagtaggatatttaagcatttttcgtaatgaaatagaaacagaaaccctgtgggcggggaaatttgatccagacaatagacaactttatccccggatgtcctttgaactgtggagagaatcaaaaaaagcacaagcgcaaaaatggacaaatgaagacatagaactagctggagaaattcgcaaacactttgcttcagcgattcaacaatatgaactttatcaacaggtgcaaaagttcaatgaaaatttagaaaaacaagtccataaacggacactgcaaatgcaaagaacagcagaacaacaacaagctgtatttggagtcatcaataaaattcgggagtccctggatactgatactatatttaaaactacaagtaaggaagtttgcaaattaatcaaagcagaccgagtttctgtttataaatttacagaagattggggtggagaatttgttggtgattttgaagctaccagtcctaattggtttaatgaaactaaactaggaattaatacaatttggaatgatacttacttacaagatactcaaggtggaagataccgcaacaatgaaacctttgcagtagatgatatccataaaatgggatttaccccctgtcatgtcgatattttagagcagtttcaaattcacgcttttgtattagctccgatatttattagacaacaactctggggtttactttgcacctatcaacatactggtccccggcaatggaaaatttcagaagttaattttattagtcaaatagcctcacagttgggagtagctattcaacaagctgaattattagtaaaaactcagcagcaagcggatcaacttacacaaacattgcatgaattaaaagccactcaaacccaactaattcaaacggaaaaaatgtcatctttagggcaacttgtagctggtgttgcccatgaaattaataatccagttaactttatttctggaaatctcatccatatcaatgaatatgctgaagatttgctgaatatgctagatatctatcagcagaaatatcctgaaccctgcgaagaaattatagaactagcagcagaactagatttagaatttctcctagaagatttaccaaaaaccttatcttctatgaaaataggggtagatagaatccggcaaattgtcttatctttgcggaatttttcacgtcttgatgaggcagaaatgaaagaagtaaatattcatgaaggcattgatagcacattattaattttgcagcatcgtttaaaagccagacctgaatctcctggtattgaaattattaaagaatatggtgatttaccattggtagaatgttttgccggacaactcaatcaagtctttatgaatgttttgagtaatgccattgatgctttagaaatttacagaaaacatacagaagaaagtgccaaagaaaatcccaggtcaggaaaaattactatttctaccactgtaggagtaatgaatgacaatgaaaaaagtgcagtcattcagattagagatagtggaccaggaatgccagaaactatcagacaaagaatatttgatccatttttcaccactaaacccataggaaaaggtacgggtttaggtttatcaattagttatcaaattgtagtggaaaaacacaacggaattttcaaatgtgattctcaattggatgtaggtacacaattctggattgaaattcctattaaacatatagtgattagtcattagtcattagtcaggagtcaggagtcaggagtcaggaggcaagaagtaatatcttattctccccagtccccagtccccagtcc

SEQ ID NO: 39 - DNA, 49548 bp, Sphaerospermopsis sp. LEGE 00249
  LEGE00249_54
cttacttatgcaaaaaccacgccaagatagtagtagaagatttaaatgtttcagggatgttgtcaaatcataaattagctcaagcaatagctgattgtggattttatgagtttaagcgtcagctagattataaagctaaaaaatttggctgtgatagcctgcgtggcgaagccataatcataattgctgatagattttatccatcaagtaaaacctgttctcgatgtgggcataaaaaagaaaatctttctttatccgaaagaatttatggctgtgagaactgtggttttgagatagatagggatctaaacgctgcaattaatttatcgcgtttggctaaagcgtgaaagtctaccgagggataactgctcccatgctcccgttgaagtagaaagtaaagtctagttttgtctaggttttatatagcagttattcttaattacgcattacgaattacgaattacgaattatgccatttgtccactgagtgatcccacgccaatatgccctaatgggaatttgataaacttcaataaaaatccaaactataattgctgaatgtgacaaaaatgtgagtaatgtccaaacataaggtatccaagaaagaggaacatctggttttggtggtaaataataagcgccaatgccaattaaagtagtcgggaaaatcacaaaagcaattgcagctaacacataaccccatgctaattccacaccttctaactgggcttgattccacttaaaaccattccactgccacaccagggggggttgtctagaaggcatcttgatttgctgtgattctaaattgacagtaaaaatttcgtgacaaaagtcacaagacatagtttccattaacggcatagcagagattttaccgatccgacaaacaggacaggggtattcttcctgaaaatttaaagaggtagaaaaaatttgggaattggtcataatcaaactggtacttctaaaaaatggttcatcagtatatagtatgctaaactaatatttaaacttccaagtaagcaagcatcttaataggtaaaaaccgataattaattgtccgaatgcttcgcccctacattgttgacgcgaaacgtaaatcaaaatgtggtttatttacctgaaaatagctgtaatattggtaactaataatgtgagagagtgtagcagaattgatgggttaaagtttgaagattgggaagttagttaaatgggtaagtatcaggagggtgagtaggagcatctcaattaggcttgacagaagggttgagaggaatctaatgtagagttgcctgaaaccgattctctatacgggttatacaaattgcgattacattgtttgtgagaaatatgggagtaagggtttcaggcttaataggtttttctatacacttgagcctaaaatttcgtcaggagaaatatcaagatggttcagtctattgcagccaaggatgtgaaactacgggaattaaagcaaaattttggcattcaaatcgttcaagatgctaccttttttcctgagtggttggatgggcttgaggctttgaaagaggaagagcaacatttattagatcgggtgaaggctaattttttagaattgatggatgatcccccaatgctagaaaatacggtgaagatggtggtacttgcgcccttgttagatttagctggtttttatcataggccatttaggattgaaacagaaacgagtgtggctttagaaatggaggatgaaggaacgattattcgggggcggattgatgttttggtgttaaaaaatcggctttggttgttggtaattgaatcaaaacggagtgattttgcggtgacacgcgcaattcctcaagctttagcttatatgttgagtaatgaggaaactgtgctaccaacctttggcatgattaccaatggtaatgagtttttatttttaaaggtattggaacataaatatgctaactctcggctgttttctttggtaaaccctgataatgagctttatagtgtattgcaggtattaaagcgtttggggatggaggtgatagcgttcagcgcaacataggaatcgctctttgggaaaaactttttggtttactgttaatcaaattactaaacctcagaaaattgccaaagcttttccagaaaatagcgattacttgccagttctcacagggattgaattaaatattactgttcaagaagtctttagctggttgagtttataacccacatttcgcaccttgggatgtcacaatcttgtgctgtaaaacatcccgtgatgtggcgaaaataactatccagtgaaaaaagtagaaaaagttaataaagcttactttcttacttcgtactgagttaaactgacaaacaagttaatacaaaaaattaatcggctgatcctgggcttgggcatgactccaatggaaaactggcaatttctgatacagaagcagggcgatcgcaattggcaacccctggaatcgccaaatttaagaattttcgcaggtaagtacagagttttggctcgttctcaccttgctaatacatctgtagaagtgcgggtaattcactcctcaattcaggaagttccacccaaacgccgcatttttaagcgtttgcgtcgtaccaatgccgatggactgatggcagtaattccctttactgacctcaacccgggaatttgggaattacgttgctctgctgacttaatgacgaatatactgggaaaatcctggcaatatagcctcatcctcaaagttttgcccatagaatcagaattgaatgagcaaccattattaggtagtggtgatcaatttaacgaagagtcccaggtgacactcactcaggaagatgaatttgcagttgcttcacccagcaacctggacatcaatcctttgtctacagcaaccgtagaagatacaatcatcaatcagccggttagcccagtattattcaaaggggaaacagccgaacaaattttacaaagcgttctcgatttagctttacccagttctgaatcttgggatgaagaacagtcagatgaggatatttcaccagtcccatcctcaccctcacccctccatttatctctagaacgggatacctatattgctcgttggggaaaaactttgacaataaatgggtatgtggaactggcagaaattgataatttggcaaatgaaagattatctaaaactaatattaatcattgttttcaactgcaattaattagtcaactgcgatcgcctttagaatccaatatcttagctcaattcacacagcctttaacagatcaaatcttaccttttacatttagtagcattattgaaattcctaaaaactgtgaatctaagttgattttggccaatattagtttatatggcacactgactaaaggtggcgaagtcatactgttagccagccatccttttataattacagcagatgtcactgaattactgaccgttacctcagcaagatctagagaaaaatctagtccaccagacttgttacctgatgataacttaccaccaactgaggatggagcaaccaaaccaaaaccacctcatcgtgtaagtttagaactattcaatatcgtcaaagctcccaaattagcacagtttcatattttaaaaccagcagctaacaaacctctacccccaagaataaaaccagtcattgttttggatggaagttcacccacactgccaaaattaccccggattcacaaaaatgcgatcgctggcaattctgccaatgcagactccagcttatcagcaggaactgtcaataagcctagtcagataccacccataaatctggacaaactggtgatcaaacaggttaaaacttctttcccatacttgaaacgtttaaaacctgcaacagaaccaaattcaaaaaccaaaaacaatctgccaaaattgatggaaattcaattatcaaagccagaaaatacaccagaattactacccagcaaggaacatgaagaaacttctgctgtggaattgatagacaatgaattgatagacaatgaattgatagaaaatacaattcctcaagttcctattctcgatatcgaggaattaaacacaccagaaatcactccagaaacatctcctctgattcaaaaatggatcaagattcaaggatacttattagatgaaggtatcgagttggtatatcaagaggataatactaatgatgaagttgatactcaagacgctaataatactgatgatatcagtgaatcaacagatgagcctcctgtaattctgaatgatgaaaatcctgctgttccacccgcttttacagatgaattacttctcaatttaaatttagatgcagaaatagaaatggaagaagttatagatttgccagaacacatgattctaggcacaagtgaaccaacccccgaaccagaatcatctcccaacatatctcaattgttgtctcaagaaatagttctagatgatacatatatgaccttgagcaatgaagacagcaatcaaccatctgaaccacaggaacaactgctggatgtatctcctccggtactaacatctttacccacaccccaactgtttttacccaatggtgaattacttgctggctcatctataaaagtgcgcttagaactgtcccaagcatcatcgacggttgtattaaagttatgggtggaagattaccaaactcgtgggttgctagacggaccgcatctgatccaagatttgcggcctactccttggggaaattgggaagcgatcgctcaattaattgtacctttaggttgtctagaagtgttagtaggggcgatcgctctcgatacgaatacccaacaggaaagccacaaagttacaatagttaaaactgtcatacctcctaacttaccgacaatagaactcgacgaggtactgggaatgtaaacggttttgttaaaaatcttgagaatttccaaaaagaggcggaattttgcagtaagctcctaagtgaattgtagtgtgacttccaaggactcttactatgtcaacttcatttttgccttcaattctggcttattcttcatttttgccttccattttcgttcctttgactggtttggttttcccagcagtcgctttcgcgtttatgtttttatatattgaacgcgaagatattgcttaatttttaagtcataggttatgggtaatcggtaattaactgctgtgttttttaccaattacccgtacctataggcagccgatttaatttaatgactaattgataaaagtgataaaagtaataaatatgtataaacaacgcggttttaagtgtgcatattcccagggtaataatagcaacgcctattttttatgtctaatcaagtttggttgtcacaattacagaaacatcgagcgatcgcagttattcgcgccccgaaaatggactggggtgaaaaaatggctttagcggtagcatctgggggaatgcagttaatagaaattacctggaatagcgatcgccctggggaattaatttctcaattacgtagtcaattacctgattgtataattggtactggtacactgtttaatatggaacaattacaagatgcgatcgctgctggggcgcagtttctcttcactccccatactgacccagaaatgatcaaagttgcagtatctcaagatgttcctattattcctggcgcacttacacctacagaaattgttaccgcctggactcagggcgcaagttgtgtcaaagtatttcctgtacaatcagtgggaggtgcaagttatatccacagtttacaagcacctcttggtcatattcccttaattcctaccggtggtgtgactttagaaaatgctcaagattttttacaagttggggcggtggccgtgggtttaagtggggaattattcccgaaaaattgggttttagaagggaattggcacaaaatcaccgaccaagccaaaaatcttacacagaggttaaattagttcctgacccctcacagataactttttcagcaaaccctaactaggggttgctgagaaagtctttccgtgagggcataggagtcaggagtcaggagtcaggaggagatttgaaaatttctttgccatctcttgaaatccccaaaaatgcacactttttccggtatacccttcaaaacccttgcactaatttctgtgtttatcagcctctaacctttgatatatcaaggttttgagtttattcagcaaacactaactaaaacaaataactatttgttgatttattcagtgatcaattatcagttttcagttttcagttttcagtttcaagctttgatgcacgaagaataaatgaggggttagttattccccaaccccagcttaactaccttcgatattcatccccacagtcaccaattaactgatataaatcccgtgactgctgcgaaactgcatcaatttttttcacatcctcagcatccaaactaaacccaaacacccgcgcattatcggcaatatgttctgcaattcctaacctagcaccaacaattacaccgcctactacgggctgatttaaaatgtaattcacagccacattagcaatactcacttgatgtttatcggcaatttgtgtcagggtggaaagcaattcttgaaataatctccaaccaccccaagcatcaatcatatttttgtatttcttcaagctggttgtattcaaatcaaaaccccgtggttctggttgatttaaatatttttctgataacaaaccaccgcacacactaccataggtaaacaattttatatcatgttcttgacagaatttagccatatttacctgtggtcttctgtcaaccaaagaatactgcacctggttagaaaaaatcttaattccagcttctgtgataatttgcaaatgttccgtatcaaaattagtcaaagctaaatgcttaattttaccctctgtttgcaattctgccatatatttgagagcatctaaataattagagtctcgatattcccaccagtgaaactgcatcaaatctaatgatttcacatccattctacgcagagaaatattaatattttcctctactatttgtttcgtcatctttcccggacgcggaacccattttgtaaaagcttgaatattattaacagcttcttctccacgagttgctattaactgacgacgaaattcaccaataaaatcttctgctggtccataatgatctgctaagtcccaagtcgtaaacccagcatccacatattgaaacattgactcaatagcagctttctggtttatccttccatgtcctccagaaacttgccacattccatttaaaattcggcaaatctttaaatcaggggtaaattgtaaataacttgcttcaggtaacatgatatttttgatctgattatttccagttgttttctgcttggtccaaaacataagccgcgacatttttgatttcttccgttgtcaacttttctttataggctgacatattacttttaccattagtgacgatatttgtaattgcctctaaagaatccataccatatcttttcaaagcattcttttttaagttcttgcctcttctaataatattaccaccattgatatgacatccaacacaatgaacgctaaaaacttccgccccattttgggtatctaaagcgttagctggtaaggaaaaattgattatccacaaacagaaagtgaataataacaaaggtatgagttttttcatggttataatgattcaaaatcagatgtaaaccctggaaaattagcgcacttttcttgaaattcctctgcatcactgacatcttcaattttataagccatgatgcgagtaccatcgggcagttttttagaagatatcacttcacctcgataattttgtgccattgttttaaactcagcaccatgaattttccaagcatctcccgaacaagtgatatttacacgccacatagttaattatttatttctcatcatcaggatatagatccccgacttctttgagaagtcggggatctgattatttatcatctcataattggtgactttgcacaaatctaacttttgattcgctgttttctatctccaggaggtatgtagacaaaaaaatcatgagtcataatgactatgtagcattatgattattatcaggattaacaatgactaacaacattaaagaaaaaatccaagcagatttacaagaagccaaagccacgggacaattaagaacagaaaacattagagaaattgttaaaaccgcagtttctcaagtttctgctgaagtcaaagaaggttctagtgagttacgcactttagttaaagatgctgtttctacagtaattgaaaatctccaagataaaggtagcgaaatcaaagaagaagtcacagcttctattgaaggtgctttagaaggggtgaatagcaaaagacatgaagctattgtcaaaacccaaaccgaactcaaacaaattcaagcgaaattagatcaagaagaagaacaactgcaacaagaagttgagggaatgttagcagaaattcaggatacaagtcaagaaaaatcggatagtattaaaaatgcgatcgcctcagcaattcatactatccaaaatagtgaagaagtcgctttattaaagaaacgctacgcccaattacaagcacaattagccattattcgtgctaatttagccgcacgttatggcggacgttctgtagaagttaaagaatatttagacgatgccaaaacctggtataatcaagctcgtccccaagcggaaaatctggctacacaagtaggagaaaaacactctcagttagaaaacaaactcggtgaagcaggtgcatccatagcgaaaaaagaacgtcaattaaaacaaaatttgagagagttattattagcagcggctgatttattcaaagataaagactctcatcaaccagaagctaatgtcaaataaagttggttcgtagtaagcgatccatcgctgactacgaacttttattttcaactggtaaaacttgaattaattgataatttttaatactaccaacaacacgataattcttaactaaatcatcagaattaggcggataaatccaagcataactcaaagctggtaattgagaaattgactgtactttttgaccatgaataggagtataaaaattaatcaaaacagaatatttatcatcggatttgacaaaagctaccggataattttggagaattgacgcaatatattcttgctgaaaaaacattctaaattcagggtttaagtctcctaataaacctaaactcccagccgtagcgatagataaccaactggcaattaaccaaccacccatccagtaacgataagtgagaaatttctgataaaaatgatagcgtccaatccaaacacaaggtacaattaaacaacctaaaccagaaattaaggacagaattgcatacttttgaatatcaagaatccctgcaaccaaagccactacaccagctaaaataaagataatacctaaaacaccaaatacataactaatattgcgggtaagagatgcttgaactttcctaaagttactaactttactcgattttctttgttggtaaattttccccaaccagtctaaactcacagcggcaaacatagcaataaaaggataaagacaaagactataatgagaaaatcgagtcaaaaataaactgatttctaaaaataaaacaataggaaaacctactaataataattggtagcgagggataggtttacgaattactaaagctaaacctaaaaggctaaaaaagaaccaaggaaaagattttaaaggaatattccagaaatagaaaaatatattatttccatgttgttcacgactacccagtcgcacgacaaaatcccacaactggccaaaactatcaccaccataacgctgccagctaaaccataaccaaactaaagtaggaataaacccaattaaaaatcctacatataacatcgggttggtaagatgacgatgacggcgattttctccaattaaataaggtaataaagccaccatcggcaaaaaaatcataaagcttcttatcaagaaacctaaaccaaaacataaaccaacaatcaaaccatgaatccatctatattttggatataattcagaatttaataaacataaaatacctaaacacactaataaaattgtaggtacatcaggtgcagctaaacgacaatattgtagccagagaaattctacactcaaaatagtcgtcgataggtaagctaactttttacccagtaatattttagctatttcatatataactaatgtgcaacaaattcccgcaatcatagcaggtattctggcagtggtatcactgacaccaaataactgataaaaaacagcaattaaccaataaaaaccaggggttttatgatgggcattttcccaaggtgctatccagttaccagaatcaaacatcaaacgcgctcttgttgcataaagagcttcgtcatgtgccatgaggctagtttcaccagaagtaaatagcaataaaggtagtaaccaaattaacaaaagagcatagtgtgattttgtcaataaacgaatttgtagccagacatctttcaataaaggtgatttatagaacatttaattaatgagaatcatcagttgatctgtagattgtgtaacagttttgttttaaaattataggacttaggcaaaattggactaaaaacctgattcttgcgtaggggtaatttatgaattacccctacttgcgttctgttctgcgtaagtcatgaattagtttggttagtatacacaattcaaaatcagaatactcaccaaattgacacaaatcaggcaattttttcttacccaaacttacccgacaaattctcaaacaaatcgtatgctgttgcgaccagatcaacgtctcaagttagatgacaccgatgataaattgttttacgactacccgcgctttgtcacccacgttgatgaaggctttattcaacaattaacagatttatatcgtcagcgactgcaaccgaacacgcgcatttttgatatgatgagcagttgggtgtctcatctaccagaagaaatagaatttgcttatgtggagggacatggactcaacgccgaggaactagcacgcaatcctcgactgaaccattatttcgtgcaaaatctcaactcacaacctcagctacccttgccagatcaagattttgatgctgttgtcaactgtgtttctgtccagtatattcaatatccagaagctgtattttccgagattcaccgtattcttaaacctggtggtgtggctattatcagcttttctaaccggatgttttatcaaaaggcgattcaaatctggcgggatgcctcagaagcgtctagagttgagctagttaagcgttacttcgcttcagtaccagggttttccactcccgaagtgatcatcaataaatcaactgcgccgaattttttacaatggttgggtttaccaggaggagatcccttctatgctgtgatagcttatcgtgtggaatcatcaagttaggaaaaaattggttatcttgactaccaatcatgatcaaatagtaaattttttggtgcaaatactcaagtaaagcagataattgcctcaagcttcaagcattgaaggagaaaaaacatgatcttatctcgtagtcgtagaattttagccagtttactactgtgtgttttattgctgactaccgcttgtgcggaaaaagtacctaatcgttttgatcaagcacaacaggaaagcacaaaacaaaaaagtggtcaggctgttgttaaaaatgccactcagggtagtaaattaaatgctttctttcctgaaagtgatgatgattacgaccgagtttatacccaagagaaaaaaggcttttccgaagcgaatttgaaaaaagacggtaaagttgttgctcaattagctatttctgatactactagcacgcctacagtagcatcaaaatatgccaatagcaccaagaaaattgaaggttatcctgctgtagaaacgggtaaaactcaaacttctattttggtgggtaagtatcaagtcaaagtgatttctaaagatccattatttaacgctagtgacagggaagattggattgaaaaatttgatcttgatggtttagctaagttgaaatgacctctaaatttcggataacaacatatcaatcaggagatttttgtgagtaaaccaatttttgagttagttgatgaattgccaaccagcggtttaactatttctatgttaaatgctttggattttattgctcccggtgaatggcaaaatactgtgggttttgtcaatactattaaaactgtgactggtgaagatgatgaggatctaattcagcaaattggtgaacgggcaatttatctttttaatgataaatcccaaggttatcaaactgctttatggctttatcaaactgttgatggtactgataaggctttaggtgcagccgctttggctaataaagttggtgaaaccattcccttatttggttttttaaactcgatcactcccaaaccagataaagctcaaactattgatttaactttaaaaatagtcgctgaattagtcgctttttgccaaattaatggtattcccggtgatagtattggcgattttgttggtgctttaggtgaatatagtggtgagtcaatgattcgcatggctgccttggttgctgttgatggtattattcctctaggtcctgattttatccaaaaatcattaactttcctcagtaacatgaatccccaagagttggatcaaaactctacttttagaaccatgaaagatgcaattcctggcaatggtactggtggtaaactagactttattggtcaaagtgttgattctgttaagggttggatgaatggtatagttagtgctaatgctttaactgctcagaaagttcttggcaatttacaaggttttcttgaatttagtgatgacaaattagactatgtagccgcttttctagatatgtccactaattactatgaacatacaggaactcaaactttagcacgacgtttgattgaacgcgcagttgcagaaatttagctaatttttgagcctaaatacaacttgtagtagtgctgaaaattaataaatgcagcactactacaaacaagttttctattagtttctactaattacttgtggctggtagattgtatcaccacaaaaaaacagattttcagcggaataatgaaaggatggtaactgatttctacacagttgcagtgaacattactgtcacctgtcacctgttacctgtcacctactatcttacttgaagcgagaacgctgttgacgacgttgcttgtgtctagctattgctttacgtttctctttttctaaaggtgtttcaaaatggcgattcttccgcatatcttggaaaattccggctttggaaacttcacgtttaaatctccgcaaagctgattcaataccttcattttcccctaaaactacttgtgtcattcctagtcctccttttttggtttaacacatacaaactagagtataaaaatatctcagcagagtcaaaccctgggctttatctgctggagactctagatttaaaagatttaaaatttcttcagaacaggattaataacggcgatcgcctccacgacctccaccagaacggccaccgccaccccagcttccacctccacgagaagaacctctttcctcacggggtttagccttgttcacttttaaatccctccccatccactcagcaccatcaagtgcttcaatagctgctgtttcctcagcttcagacgacatttccacgaaggcaaagccacgtggacggcctgtttccctatcagtgggtagctgcacattggtaactttaccgtactcagcaaaagccgttttcaaatcttctgctgtcacctgataggacaaatttccaacgtaaattgacatagatggtctcccaaaccagagagtgtagagagttagattcggagagacgcatttaaaacaaattaaaacgacttactcaaccgaaaataatccttatatccgcgagtatagcacagcctttgaatatgaactcacattgagtaacatttcttcagccatctatgaactagctccaactgaatagcagactagctactgatggaaggctgaaagctaaaaaatcattaaggattttaggaattatcactcttatttaacctagttttcaattatagcataactcacgtctacatggaaaataatttatcttttgtgtccgaacttcatttagccgcaaactcagtcaatatctgctctgctttctgacacaatatttcgtgatcttgagaactactagccaacaaaccgccccattggttgatgtcaccagtgttatactctaatggtctgccgtcaaagtaagtaaatttaccaccagcttctgttaaaattaattctggtgctgccatatcccaatctttaggggctgactttccagaaagggaaatataaacatctgcctgttgttcgacgatagcagccactttacaacctacactaccaatagctttttgtttttggcagggtagatttttaagtaaaaattctaacttatcatgacgatgggaacgactgacaaccaagattaaatcttcaagtggtttagcagcagccactttcaaaggatgagaaccattaacagtttcgacaaaagtaccaccacctttagtagcataatatatcttttccgcttccggtattgctaccaccgctaaaattggccttgtgttttgcactaaagcaatatgtattgcatattccccagttttattaataaaatctcttgtaccatccaaaggatcaataatccaaactaactccccaggatatttaccttgttgagatttataggtttcttcgctaatataaccaaaatcttcatcaacaaatgctgcctgtaggtgagataggatatactcactcacaactctatcggcaacagttataggttcattttgcttgtattctatttctagattaccgttgttaacagttccttgataataggagcgcagtaacttagctgcaccccaacccacctcacgagtaattttgagtatttctggtaagtttgtcattaggctttgggtgataaatttaccaaccataacataacatgagttcgaataagtaggtaggcgttgaaatttatccttatgccaaggcagaaggtaaaaagactgatcaccctgattggtattattaaataaatcacacataataaatcaaaaatagtcggttttcaatacttatttgttaagctaaaaacaataaaaattaggtagggttttagcactgctaaacccttaactaacttgttttaaacttataaattaccctttaaacttcctccccaaaaaagcaattatttcccgccatgcagatgtcgccgcttccgcatcataacgataaccgtcatctcgcataaaagtatgttccgctgcataacagaaaaattgatgaggtatttttgcagtttctaaacccttaataatagtctgtctatcctgttcaggaatatggggatcttgagtaccaaaaattaacaacatttcccccttaatttctgaaaatctgtgaatagtatccgccacacctttacctaatttaccgataggaatacctgtaggataacaggaaacacaagcttttatttcactttcaaaagctgcccgaaaagctaaatgtccaccaatacaaaaacctaaagttccgatttgttcactaataactgatttctcatttttcaaccaattaatgacagcgcgagtatctgcatcatattcagaaattaaagttctgcgtgcatcatcattaccgcgcattctccccagatcatcaggttcaatgatagaacctataggttcaatacggtgaaaaatttccggtgcagcgacaacataaccaaacccagctaaataattaactaagcgaattattgccccacctaattgataaatatcactgtaaaaaacaattcctggatatttaccctctgttttaggagatgcgacataaacccgcattaaactatcatctacttttaattcgatattgcgtttaacaatttgcattttttgattttttgctaatgtgttaatttgtaattcttcaggtttaataataatcagtaaattttcccaaatactcgattttttcaagaagttgaatttcctagtttgacacgcattttgtatatttttgtatctttcactaagactatgtgctatcatatacaataaaggatgtgtcgtaaaattcaaaacatccaaagaagaacttttagaatttcctgaagatgtaattgatgaaattgggtatattctctatcgagtgcaaactaatcaaactcataccaaaatcaaacccttaaaaggttttaatggagtatttgaaattcgcagcaattatcaaataaataatttaagtaatggtattctcaaagaatttacaattgagaatttactaacttacttaataaaattaggacacaatatagaaataatggtaacaaaccaacaaacagaaaaatctcagcctaaaataaatgttgtttatcagagaattgcttgatagtaattggtattatcatgttaaacgaatatgatttcacttaattgatgaggtaaaaaccattatggaaacaatcaaaaagaaaaaatatatttattggcaagatgaggatatgtttatcggttacttagaagaatatcctgattattggacacaaggaacttctttagaagaactccaaaacaacttattagatttgtatcacgaatttaccagtggtaacattcctgcgatcagaaaagttgcggagttagaattattgtgaaaatgctacaaaattactaactcctctctctgcgtctctgcgtgacataaaaaaaatctgtaacaacccaccgaaaaaacaaatcacaggtaagatgacaccaaaacagcaaaccattacactagacaatggtgtaaatactaccggagttaaaaatgacattagccagcactccaaaacaaaaacccttaacagacacagaattacaaaagattaacgcatattggcgtgcagccaactatctttcagtcggacaaatatacctcctcgacaaccccctactgaaagaaccccttaaacaagaccacgtaaaactgcgactattaggacattggggaactacccctggactgaactttatttacgtccacctcaaccgcatcattaaaaaatacgacctcaacaccatctacatcgcaggacccggacatggtggacctggacttgtagctaacacctacttagaaggaacatatagcgaatattaccccaacatctcccaagatgcagagggaatgcaaaaactgttcaaacagttctccttccctggtggtattcctagtcacgttgccccggaaacccccggttctattcacgaagggggagaactcggttatgctttagtacacgcttttggtgctgcttttgacaacccagacctgttagttgcggcggttgtgggtgatggggaagccgaaaccggacctttagctacaagctggcattctaacaaattcctcaaccctgctactgatggtgcggttttaccgattttacatttgaacggttataaaattgctaatcccaccatattagcacggatgccccatgatgaactagaaagcctatttatcggctacggctataaaccttactttgtggaaggtgctgatccggcggatgttcatcaacaaatggctgcaactttagatactatcgttacggaaattcaaggtatccaaagagaagcgcgggtacatggtttcaaaaaacgcccgcaatggccaatgataattttaagaactcccaaaggttggactggacccaaggaagtagacgggaagaaaacagaagactattggcgatcgcaccaagtcccctttagcgatatagctggtaaaccagaacacctaaaactgttagaagactggatgaagagttacaaacccgaagaactctttgacgaaaccggtcaactcattcccgaacttgcagaactcgcacccacaggccagcgacgcatgggagacaacccccacgcaaacggtggtatcttgctccgtgatttaatcataccagacttttgcaactatgcagtagcagtccccaaacccggtactgttaacgctgaagctaccaaagttactggaaaattcctgcgggatgtgatgaaagaaaacctggacagccagaacttccgagtttttggacccgatgaaaccgcatctaaccgcatcgatcctgtactagaagttactaacagaacttgggtggcggaaactttgcccgaagatgatcatttatcagcaaatggtcgggtaatggaaatgctgagtgaaaccaactgtcaaggatggttagaaggatatttgctaacaggaagacatggtttcttctcctgttatgaagcatttattcatatcattgactcgatgtttaaccaacacgccaaatggttaaaaacaactcgtcatatttcttggagaagaccgatcgcctctttaaattatcttctcacatctcatgtttggcgacaagatcataacggtttctctcaccaagatcctgggtttttggatcatgtaattaacaaaaaagccgacgttattcgtgtttatctgccacccgatgctaacactttgttatctgtcaccgaccattgtttaagaagtcgcaactatgtaaatgtgatagtagctggaaaacaaccggcactgcaatatttagacatggatgcagccattaaacactgtaccaaaggtttaggaatttgggaatgggcaagtaatgatcaagatggtgaacccgatgtaattatggcttgtgcgggggatattcccactttagaaaccctagctgcggtggatattttacggcaaaatttcccagaattaaaagtgcgggtagtgaacattgtagacttgatgacactacaaccaaaaagtgaacatccccacggtttaagcagcaaagattttgatatcatctttaccacagataaaccaattatctttgcatttcatggctatccttggttaattcatcgtctcacctatcgccatacaaaccacaataatattcatgttcgtggttacaaagaagaaggaacaacaaccacaccttttgatatggtggtaatgaatgatttagatcgtttccatttagtaatggatgtaatagatcgtgtaccaaaattgggttataaagccgcttatgtaaaacaaaatttacaagataaattgattgaacataagcaatacatcgagaaacacggtgaagatatgccagaaattagagactggaaatggccttattaaaccgtaacgactaaataaccccagatcccccctaaccccccttaataaggggtgaatagattcacactttttaagggggatgtagggtatctaatttctgatttatttgttatattaatataaggtagttaaccctggagattaattaatatgacacaggaattaatagacttgagaaatagtattttaactggaagatatgaagatgcgttagcaattgtagatgaattagaggggatgagtaaacaagcaattttcaggaatattcaatcatttttgagagttgtgttaattcatttgatcaaaaatcaaattgaacaaagattaacaaattcttgggcagcatctattcgtaactctttagtagaaatcaaaaaaatcaatcttaaagaaaataaaaaatcctattacatcaataaagatgaatgggatacctggttgcaggaagaaatagaattagcaataggtgatgcaagtttagaagtaatgaatggtaaatttaacagaaaacaactttcacaacttctcaataaagaacaattaatattaacagcaacagaattactcacatttatctataattatcaaatccgagaattacctgatataatagatgaatatttaggtaaattacccagtggggaaaattggcagttagggaaaagctaagaggtaaaaaaaaatgacacaggaattaatagacttgagaaatagtattttagctggaagatatgaagatgcgttagcaattgtagatgaattagaagggatgagtaaacaagcaattttaaggaatattcaatcatttttgagagttttgttaatacatttgattaaaaatcaaatagaacaaagattaacaaactcttgggttgcatctattcgtaactctttagtagaaatcaaaaaaatcaatcttaaagaaaataaaaaatcctattacatcaataaagatgaatgggatacctggttgcaggaagaaatagaattagcaataggtgatgcaagtttagaagtaatgaatggtaaatttaacagaaaacaactttcacaacttctcaataaagaacaattaatattaacagcaacagaattactcacatttatctataattatcaaatccgagaattacctgatataatagatgaatatttaggtaaattacccagtggggaaaattggcagttagggaaaagctaagaggtaaaaaaaaatgacacaggaattaatagacttgagaaatagcattttagctggaagatatgaagatgcgttagcaattgtagatgaattagaagggatgagtaaacaagcaattttaaggaatattcaatcatttttgagagttttgttaatacatttgattaaaaatcaaatagaaaaaaggttaacaaactcttgggttgcatctattcgtaacgctttagtagaaatcaaaaaaatcaaccttaaagaaaacaaaaaatcctattacatcaataaagatgaatgggataattatttagaagaagaaatagaattagccataggtgatgcaagcgtagaagttttaaatggtatctatacagaatttcaactagcagaaatggttgataaaaataacataatttccactgctttaaattttctagaattgacttatatccattctgtaaaagacttaccaaaagctatcacagaaatcattattaaattacctggtagtgaaaaatggcaataaatatgtattatagtattatattatatataaatttgcgtttatttgcgtttgtctgcgtttaaaaacagactttaaaatatcccgtgtagtaataaccgtacaaaataattacctaaatatcaacaataacgataggaataggtgtctttataaggtaggatgaaacttaacacaaagtaaaaataccttactagagaattatcatgacagtcgctgcaacttttgatttagatagcttaaatcagaaatttgaaaccgctacccctacagaaattctagcttggtctgtggaaaacatacccacaggtttagtacaaaccagcgcgtttaacgttgatgacatcatcctcacccacattttatatactgtactcaagcatccagtacccgttatcttcctagatactctgtatcacttcaaagaaactttagaattagttgctaaagtaaaagacctatataacctagatttaaaaacctacaaagcacctgatgtagacacccgtgaagcttttgcggctaagtacggtgaagcattatgggatacagatattatcaaattccacgacgttactaaaattgaacctttaacacgcggtttaaacgaactaaacaccgtagcttggattacaggtcgccgtcgtgaccaagctgttacccgtgccaatatgcctatttttgaattagacaaccaaggacgtttaaaaattaatcctttagctgcttggactcgcaaacaaagctgggattatgttgcagaacacaaagtgatttataacccacttcatgatcaaggatatcctagcattggtgatgaacctattactactcaagtacgtgaaggtgaagatgaacgcgctggacgttggagaggaactggtaaaactgagtgtggtattcacatttagtttttagttattggtcattggtcattggtcattggtaatgtgttaaaaaatggctaattactaatgactaatattaatattttgtatttgtctgaatcaggatatccaggacacccttcgggaagtcaaaagtcaaaagtcaaaagtcaaaagtcaaaagttagaatttttttgtctgaatcaggatatccaggatttgaggatttatggctaacgccacgcttcgttatcaggatgttattggatgattttttgttgggaagttgggatttttcaggatgcttttgaatgatggtttttcaatgattatcaactatctataaattaccatcctgtacatccttaaatcctggttatcctgattctgacaaaatgcaatttctatcaccaacgaattatctaaaaattaccatcctgttaatcctttaatcctggttatcctgattctgacaatattatatttaataccagtcaataattgttagtcctgaaattctggaaaattcattaatattgtgagtaactagagttgcttgcaatgctatagctattccagcaattaaaacatccatttgacctattggagttcctttttgttctaagtcagcgcgaattttagcagcagcaaaagcagcatctctatcaaaaggaactaagttaactctgtttataatttgttgcagttgttgggtgcgttttgcgggtgaatttgatttagcaattcctacttgtaattcaaagagaacaattgtaggaattataatttcttggttcggtattttagcgagatttgcagcaacttgtccttgacctttaaaataataaatcaaggtgttggtatctaaaacatacattttagaaactctcccgcaaaacatcttctcctgcactgctgcgaatttcttctaaactaggaaaatcatctttccaacttccagcaagtgaataaactaattcttcccaagcaaggtttgtagaatcattgatattttggttagtatttaggtgtttattacggataaattctgcaaaattgagaatttcttcagcttgtgctgggggtagagttttcacaagtgtgtaaatttgttcagcaattgtcataattttttctgcatcaggatattgattttatctgtgggttactaatattttaatttgtctgaatcaggatgtccaggacacctttcgggaagtcaaaagtcaaaagtcaaaagttagaatttttttgtctgaatcaggatgtctaggacacccttcgggaagtcaaaagtcaaaagtcaaaagtcaaaagttagaatttttttgtctgaatcaggatatccaggatttgaggattttcaggatgttattggatgattgttttttggaagttggggatttttcaggatgcttttgaatgattggttttgaataatttaaactatctataaattaccatcctgtacatcctttaatcctggttatcctgattcagacaaagtgaaacctaacatctacacatttttgaagtgttgggtttcgttcctcaacccaacttacatctaatggttttaaccgttgttttttattaaattaccatagccactctaggagagccattaaccaccatattacttgctcaatttctatcttcctgatactgtcaacttcagaaaataaacccacccattccttaataatttgcggacggtttttaggttctaattccaatcctttaacaattgcttgatttaacttatcactaatcctagaatttaattccttcggttctattaaagtccgattatctagcttccttgctaaacaaggtgtggcagtatctccagtcaataaataaaacaaagaagcagctaaagtataaacatcaagagttggtgctttctctgtatctaacatttgttcccaaggtgcaaaagctaaattagcagcttggttaatactctcactgtccacatttcctactaaaccaaaatctatcaaaactacagtattgctattttctcttaaaatcatatttccaggatgtgcgtcccggtgaataatgccattttcatgacaaatagataaagcgtcagcaatttgtttaatataatcaatagtagtagattctgataaaatacctttatcctgtactaaatgatataaattttcacccttaacaaaatccatcaccagacatggtaaaccatcctcctcaaaaaagtctataattctgacaatattgggatgttgaagttgggtaatctctgctaatcttcttccttccttgcgaaaaccttccacatatttaggataattagcatctctacacaaacgactattaggagttttaataacaactggtaaattcaaatctttatgtatagctttaaaagtaacaccaaaacccccagaacctatttcttcttctattacatattggggacgttgttgtaaaggctttccaggttgtaacataaaaagatgtatgcttaaatatgcccgtaattgtaacataacccaagcatcaaaaataatcgaacacagataaacgcagataaaaactaaaacctcctccctccgtgtcctctgtgcctctgtgattcgttatcataaaacctatagaaaatctctcttaaaccctcttaccttcgtgtcctttgcgttctttgcggttcgttaaaaaaaatcccactcagcaacatgataaaaatcctacacctttcagatatccatataggaagcggtttctcccacggccgcatcaaccccgccaccggcttaaatacacgattagaagattttgtcaataccctatctttgtgtatcgatcgcgctttatcagaaccagtagatatggtgatttttggtggtgatgcttttcccgatgccacacccgcaccctacgtacaagaagcctttgctagtcagttccgccgccttgtagatgccaatataccgacagttttgttagttggtaatcatgacttacattcccaaggtgtgggcggcgcaagtctaaatatttaccgtactcttggcgttcccggtttcgtggttggtgatacattaactacccatcatatccccacccgtaacggtaaagtacaagtaattacactcccttggttgactcgttccatgttgatgactcgcaaggaaacagcgggtttatctatggctgaagtcaatcaacttttaacagaacgcttagaagtggttttagaaggagaagtgagaaaacttgatcctgatgtacctaccgtacttttagcccatttaatggctgataatgctatgttaggtgctgaacgtttgttagctgtgggtaagggttttactttacctttatctttgttaacacgcccttgttttgattatgtggctttgggtcatgttcactgccatcaaaatctgaataaatctaatgatccaccagtgatttatcctgggagtatagaaagggtagattttagtgaggagaaggaagataaaggttatgtaatggtggagttggaaaaaggtaatgtagagtgggaattttgctctttacctgtgcggacatttcgcactattgaggtagatttatctaaaagtgatgatccgcaggatgttttgttaaaggcgatcgccaaatataatcttgaagaaactgtagttaggttaatttataaattgcgttctgaacagttagatttaattgaaaattccgcaattcataaagctttaagtacagcgcacatctatacaattcaaccagaattagttagtcaattagctaaaccgcgtattcctgaattaaacgctagtagcagtatagatccgatggaagcattaagaacatacttaaataatcgggatgatttaaaagatattgctacaactatgttagaagctgcacaaactttattagaagatgaagaaatattgctcaataatctttagttaacgcagataaacgcagataaacgcggatatttcatgagataaattaacttaaatttaacggttagtttgtcaatcatctggcaaaattgttatatttcagaaactaggttttactggactttttatgtccttctaccctcaaattaaacaatttgtcatcggtaaatctctacctactagcgcccacagtgaggagagattaagtaatgctgctgctttggcggttctttcttcggatgcgctttcttctgttgcgtatgcgactgaggaaattttattggtgttggtggccgctggtagtggtgctttgggtttgtctctacctattgcgatcgccattatatttctcttgggaatagttgttctttcctatcgtcaaaccatccgcgcttatcctcaaggtggtggttcttacatcgtcgctagggaaaatctcggtttatatcccggtttggtagctggtggttcgttgatgattgattatattttaaccgtaactgtcagtatatctgcgggtacggcggctttaacatcagccattcccgcactgcaaccccatacagtgcttttgtgtttaattttcatctttttattaatgttggcaaatctgcgcggtgtgaaagaatctggtaggatatttatgattcctacttatgcgtttattgccagcatttttctgctaattattgtcggtttgtttaaacaagttacgggacaagttattacagaatatccaccaattcctattactaaagaattgagtttgtttttcattttacgggctttttctgctggttgtacagcattaactggggtagaagctatatccgatggggtgttagcttttaaacctccagaatggaaaaatgcacgattaactttattttatttgggaacaattctgggtttaatgtttgtaggaattacatttttagctaattcttatcatgttgttcccgcagaaggacaaacggtagtttctcttttaggaagagaaatttttggtaatagtccggtttattattttgtgcaaattgtcactttattggttttgttgttagcagcaaataccagttatgccgattttcctagactgtgttactttttagcaagagatggttttttaccccgtcaattagcattattaggcgatcacttagtttactctaatggtatcgttctcctgagtatttgtgcagccattttagtcatcatctttaaaggacaggtaaacgctgttattcctctttatgcagtgggtgtattcacatcctttaccctttctcaagcaggaatggtacaacattggtttaaagaaaaaagccaaggttggaaagctagtgcgatcatgaacaatttaggtgcgatcgccacttttatcgttctcctagtcattatttcgacaaaattcctcttaggtgcttggttagttgtagttgcaattcccgttgtagtcagtctttttgtagccattcatcgtcactatcaatatgtagcacaacgcctcagtattcaagacatagcaccccggagttatatacccaaaccaaaaccagaagtgatcacccatcctgcattggtgatagttggccaactcaaccgaggaacagtagaagctttagactatgctcgcacaatagcagatgaaatagtcgctgttcatgtagatattggttcaacagatcaggaaaaactgcaagaaaaatggcgcaatttagagtcagatattcccttaaatattattgactctccctatcgttctgtaattagccccattgtgaattttgtcagtgaatttgaagaacatcaccccgatgttttcaccacaattattattcctgcttttgtcacccgcaattggtgggatagcattctgcacaaccaaacgactttatttttaaagaatgctttaagagcaaagaaaagtcgcgttgttacaactgtcagatattatttgtaaaatcatttgtaggggttgagcagtgctaaacatccacttatttaaatgattgagaaaattaaaaaaatcttgctgcatctacttgctgcatctatattagaagcagcatcaaatctattagcaaataagatttattgcagattccctgcaccaactaataaccttcccctctattcaatctttcttcatgtttggtaattacccacagtgcatgaatactaccgggaagccaacccagcaaggttaacaaaatgttaattatcaaagttatacctacaccctctgttagaaatactcccacaggaggtaagaacaaaccaagcagcaaacgagttaatttcatgggatgattcctattttttcaaaactacttacttgctttcatttaagattcagtcgtgatttgactattattgccttgtaactccagatttctttctgcaaagtatttattgatgaaggtattagccaaagatagaactactggagcgagaagaaaagcgataattccctgcactctaaacccaggaactaaaactgatgctaaccaaaaacaaatgccgttgactattaaagaaaatccaccgaaagttacataagtcaatggtaaggatagggtggaaataattggtttaattgaaccattaatcgcaccaattactaacccagcaattaaagctgcgggaaaattggcaattctaacaccaggaaagatgatatcgacaattaacaagcttaatgctgtagcgagtgcggttaaaaatgtcgcccacattatttttacctctctaactgctacctttatttttcaagaattttgcagttttcacatctgttgctagataggattgaggtatatcgaaaggatgatttttcacttataggaaactggagtcttttccagtcagcggttttcactcctgactcctgactcctgactcctgactccttgcttattgtttgactgctttcattgataaaccaatgcgttttaatttttcgttcacttctaatactctgacttttactacttgtccaactttaactattttcttgggatcatctacaaatctatctgcaagttgggatatgtgaactaaaccatcttgatgtactccgatatcaacaaatgcaccaaagttagcaacgttggtgactattccttctagttccattccctcttttaaatcgctaatttcttttattccttctttgaatgttgcatacttaaattctgcacggggatctcttcctggtttttctagttcgttgagaatgtcacgcagggttggttctccaatggtgtcagttacgtattttttgaggttggtttttttcaggttttcagctatttgtgttacctgttttaatggtacttgtaaatctttagcgatcgcctctactacaggataactttctgggtgaactgcggtgttatctagggggttttctccatttctaattcttaaaaaacctgctgcttgttcataagcttttggtcctagtttcgctacttttaacagttgtttgcgatttttgaatgcgccgttttggttgcgataagcaattatattgttagcaactgtgggggtaattcctgaaacaaaggtgagcaattctttggatgcggtgtttaaatctactcccacataattcacacaactttctactgtttcatcgagtttctttttcagcaatttttgatcaacgtcgtgttgatattgtcccacaccaattgatttggggtcaatttttactaattctgctaggggatcttgtaatcttctcccgatactaattgcacctctgacggtaacatctaaatcaggaaattctgctagtgcaactttgctggctgaatatatggaagcaccagattcattgactatgactttaacaggtttgcgttcacaagttgttaatacttctgttacaaattcatcggtttcacgggatgctgttccgttaccaatggcgattaattcaatgttgtatttttgaattaatttctttagtgtttgtgctgctttttgtcgttgttctgctgcttgatgagggaatacggcttgatattctaagaatttacctgtttgatctaaaactgcaactttgcaacctgttctaaaacctggatctatggctaatgtgggtttcattcccgcaggtgcagataataataattcccgcaaattagcttcaaatgttttgattgattctatatcagaataagtttttttctcagaaattacttcactgataagagaagttttcatcaagcggttaaaggcatcttttaacattgcttgataaaagtctctgatatttctaactttggttttaatttcttgagattctaaataagaaagtacaaaatcttcatcaaaatcaatgtcaaaatttaagattttttctgcttcaccccgacacaaagccagcatattatgaggggcgatatttttgactttaatttgataattgcggtacatttcaaatttggttgtaccttctggatgttcttctttaatacgggaaacaaataccccttcatctaagaaataatcccgcagataggcgcgtaattctgctttttctgctacttcttcagctaaaatatctgatgcgccttttaatgcttcctctgcattttttacgcctttttcttcagaaatatattttgccgcttctgtttctaagtcagcacctacgccatttttcacatttaatgatttaataaatgctgctaaaggttctagtcctttctctctagcgatagttgcacgggtgcggcgttttggtttgtatggtaagtataaatcctcaagttctgttttttgtaaacaggaggttattttctgctgtagttcgtctgtcagtttaccttgttctgatatagcatttaaaattacttgctttctttcttctaattctgttaagtatgtatgcctatcagataagtcccgtaactgcacttcattcatttctccagtgcgttctttgcgataccgtgcaataaagggaattgtcgcaccctcagcgaaaagttccagtgcgttctgcacctgatggggtttaagttctagttctgttgctagtaattgcggaatgttcaacattcgattttttagttaaaaatgctacttcaaaatttaatatgcttgctcaatatgccagtacaagcctgtaaatttcataatatacccaattatatacccaattatatacccagttatataacttaaactgtttcctatcctcagtttaagctttgttcaagaaaaatattgtaaaattcttgtaaaggaaacatacgtaagtgtataatcaattcttattcctcctataggttgaatctatggatttcaaccatgaggctgttagttcaggattggttaaaatgcctttgttttttctgattccattatttactgggttaattactggttacttttggaacaaacataatgatgaagttgcttatatttcaggtgtattgacggctgtaacgctgattctgagcctgattgttgcaccttggcaaattcagttaagtttgttagtttttgtacttttattttctaacaagttgttgaagaaatattattaaacggtttgtggtaaaacagtagcaatgcgactctacacactcaaagagtgtacatggcgttgctacgtggtttcatccatttgaaatgcgttggttatatttcgttctaaaatcatgatctagttaccaatcaccaatcaccaatcaccaatcacctattaccaatcaccaatcaccaatcaccaatcaccaatcaccaatcaccaattaccaatcaccaattaccaatcacctattatgaattaatttctcctctcactaaaattactgtactatcaacaccagaagcaatattttcaggaatattaccgtgaattgcttgttgtaataaaccctcacgagaagcacccaaaactacaacatcaaaatcttctttcttgactaaattaattaccccttcggtaacagaatcagcttctataggtgttgcaaaaacattactatgtaaattgcggtgtcggattaactgacgagtatattcttctaaaaattgcagatttggttttaattccgatggtttaaatacttgagtgaggcgaatttctggctcatttcctaatgtgactaaagctggtaataatttaatggctataggtgcatttggtccccctgccattggtactaaccaacgattaaaatggggaggttctgaataattgcctaacttcacaacaactacatcacaggtagcttgacgaattatagtgtcaacaacagtaccaaaaatacggccgggggtagaagtatttcctttccaacccatgaacattaaatctatatgacgttctttgattgtttctaaaattgcttgcccaacatcatgggcaactcgtatttgtgtatgaataggaatatgcaattttttggctaaagcttccgcgtgtctgagtaagcgacgacttcttgtagttctgacttctgtttctgatggggaactgttacgggatactaaaataatttgtaaacactctaattcataatggcgatcgcgggcaatagtagcagccatttgtaacagagtgtctgctgtatctgggttagcaagtgtaactaataatctacctctacccacactaggcgatcgcgtttggtacactacataagatggttctggttgtggtccagtcataccatttttacagttcagatgatctgcttctgctctaataatatctgcacgagtaataataccaatcaatttttgtttttctaccactggtaaacgactaatttgataacgatccagtaaatacagtacatcactcaaagtttgtgtcggcttaactgtgattggttttggtgtcattatttcccttaaaactgtatgccggaaggggtaaacattttgtatatctgattgagtaataattcccactaattgatttttttctaccactggaaaaccccgatgatgagaacgagaaaaggcttgaattgattcttctatagacatttctgcctctagagtttctacccgttgctgcattacatccttggctgttaattcagttaataccccttcaattggagcatttttctgaagtttgatcccatttaatagtaaaagtttttcatacagtgaaccaggtaaaacttgatccgcaactaaataagaagtgacagaaacaatcatcaaaggtaatacaagattgaaatctgtcgtcatttcaaaaataatcacaatagctgtaattggaactttagaaacggcgctaaaaaagccccccattcctgctaaagcgtaggtagtcggagaaccaaaaccccacagttgaaactcacaaactccaactatatgacctaaacaagaacctaaaattaaactgggtgcaaataatccccctggagcgccagaaccaaaggcaattaatgttaaaataaattgactaataaaagtgataattgctaacaaaagattcggttgactggcaatcatatactcccgtaaaccagcattatcacgataatattccgggagtaaagccactattaaacccgaaatcaagcctgctaaagccactcttaaagataagctaatgtgtaatctccgataagttttaatactgaatattaaaccgtgattaaatacagcacctagcaaccctgccaacacacctaacaataaaaatataggaatttcttgcagggaaaattggctagaatagtccattaattctaggtttagttgcaaacttccaccacctaataaccgggaaattacaccaccgataaaacaggcaataatggcagttcctaaagttagtcctgataaatcttggagtaactcttcaataataaataataccccagcaataggggcattaaaagcagcggataaaccagcacctgcacctgcggcgatcatttggcggcgatgttctggggaagtgggaaaagtgcgactcattccggccgctaaacctgcacctacttggacagtggggccttgtcttcctaatgtgatccccgaacccaaggcaatgatagcactgagtaacttaattaatgccactcgccaggataacttaataggaacattagcaagactagctttaacttgaggaataccactacctgcggcctctggtgctaacctttgtaccaaccaacctgctaaaaagccaaaactcatcccaattaaaggtaaagttagccaagctggtaaaagttgggtactgtgaactcgccatgttcccaaccaacctgaaccttgtttaagtaatactgctgataaagccgcaataattcctatgacacaagcttcaatattggcatagcccattgaagatattgctaaactttttttggactgccacaagttgcgaaaacgctgggttagtatgtccagggaaatcataatttaaaatttaaaattcaacattcaaaattgaaaaataacctccataaatcataattctctataattggtgattggtgattggtgattggtgattggtgattggtaaaattattagctattctctcttaccttcttactgtcacctgtcacctgtcaactgtcacctgtctcctgaaatcaactatttttcccagttgtagaaagtccttccactatcaaagatggagtataacaagaaccattccagtctgcatccccaccgagtttaactatttgtttgagggctgtgtaaacattgccggcgaccattgtatctttaactctaccaattatttgacctttttttaccaaatatcccaaatcaatattgatagaaaaatcaccagaaattcctcctcctcctcctagcatttgatcgactattaaaccttcatccatatcttgaattaattcttgtaacgttgctttaccaggttggatgagaaagttaaataaaccaggggtgggataactacccaaaccaggacgaaaaccattaccagtgctaccaatacctaattgtctgccaatagtgcgatcgctataaaaattgcgtaaaattccgttttcgataaatatcaaagacttggtaggattgccttcatcatcaaaaggacaactgtaaggacctgcttgggggttttggtaaagggtgagagagggtgcaacaacaggtagaccctttttttctgcccaaggagaagctttttccaagacttgcttatccatttaatgccgcttgcacagttccccaaagcatatccgcagctttggaagtaaataaaactggaaaccgaccgctaggggtagaaacgttttcttttgcccaatttaatcgctgtaaaatttgattcgccactctggcgggttcaagttcaccgcgttgagtttgtccatcagcaacactgagaaaatcatcacccctgacccattctgcggacatatagcaactgagagtagtatcagtatagtgacaatccaaacctttgctattgattaaccgagtattttctacatcacattcccaatcactattacagagaacatcaggatagaattcacgcacgatagcgatcgcatttttgccccagtctatcagtttgtccactggaacagcttcccccaaatcagggtaatatttttcagaattactactgagttctacaggttcagggtgatttaactgactgagaactaaagctcgttctaccatcccttgaggatctacagaaccgtaagccacagtcagtcctggacgaccgtttcgccatagccgcaatgctgtaccttcagattgactggtttctagttgttttaagcggttggcctcaaaaaacacaggacgagaaagcgatcgggactgatacacttccgcagcctctgcgccagattttaaagccagttctagcaactgttccgctagtgtatcttgtgacaattttgcagaacccatttcccttgattaattgtggattttggattttgaaccccagatagaccagtccattatcccatcagcgtgcatcaacagttattatttttgggtaattggggactggtcaccagtcaccagtcaccagtccctacagattcacctcttgtaacagccaaaaaccagcaaaagattgagcttggggatcggactggacaccaataaaatgcactccattggcttgttgtttggctgcttcaaaaccttgtgcttctttgagcagttgaggagttctgatatttgccaaaatccaactttctgttgcaccggtttctaaaatcaatctgtctccttgactggtatcaaatcgcaaataagctaactctaaacctgacatccacccagcgataggtaaagctctaggtgaaaaaatcaaaatccccggaatgcgagtttctgggggtaattgtgccaattctaggggaaaagcttcaccaaagccaatttcccattctggcatatctgcaaaatctccggcttctaaactcacaaatgcccattgtttgccttccaacgcatccggtaaacgctggggtaagggtctttctaagcgcacagaaagatttgtaccgccttgatatcctggttcttggggataaacttcctccattcgctgttgtatccattgattgagaatcaatgctttccgactaggtaaggcaggaatacctatatcttgacaggctttggtaatcatattattcatttgccgacggaaaaagcggattttaattggtgcttttcccgctttcttgatcgcttcttgtaacgctgtccgcaaccaaactgaatttacttgggtactagggcaatattgagcatagcgaaacaaggaatctgttttagtgcgtacatcagtaggactttcacacactaagacttcccaaacttttttttgatttgcgtccaatatcggacgagagtaaaaatcgagttcccaaatactgcccatgttatacgatgaaatctggcgagttgatgttttgttgtctttccactctaccaatctacagccgcaatgaacgatcattcattactcatcatcggctctaattgtcgcacttgtgctggtaaatgttgttccatccaattactcaaatccgagagaaattcacgataattaagatcacaatgtaaatcgtgatatgctcccgaatattcaatacgcaacttatctgggtaagttactcgttgataaaaaatttcactcccctctggaaaaaccactctgtcagcaccaccatgtaaaatcaataaaggtgctttccattcttcagcatgggcattaatccaagctagtgtagtaaagaactctgtagaaaaacgagcggtagcacgggtatggcgtaagggatcttgagtgtaggtagctacaattttcggatctcttgaacctgcggtgatgtcgagtccagtatttaaggagaaacgcggccacaacctcgaaagcatttttcccagcagtacgcgcactggtgatactcccacttctccaatactaggtgcaactgcaatcactccctgtaatgcagatatctcttctggatggcgcaaagcatattctaaaactatcattccccccatgctgtgtccaaatagaaaaattggacattctggttgttgctgttgcatcatttttaagaatgttcgcacatcatcacgaaactcggaccaagtattaatgtaacctctttgacctggtgattgtccatgaccacgcaaatctaagccataaacagcatattgctgaggtaacaaatgttcaattatatttttgtaaagtccgctgtgtcctccgagtccatgtactaatgctaatatccccctgattttaccccctggattccagttttgataatacagatcaattcccccaacacctttaaatgtgcctacgctgtggtaaatagtcatgattagttttttacctaatttcccagcaagtttttagcttatcaacgtacattgtagggaaaatatcttctaactgtgggaggattacagaaattttggtgattggtgattggtgattggtgattggtgattgggttgttacagtatgttgtaaagatggaaaataataacgagtctgataatttaccgcttttgactgagaacgctattaaacgggtttgggaaggtgtggcggcggcgagcgatcgcactattcgagatactattgatactactctcaatcagttatctgctattgatcaggaaaatacagaaccgcgagttaatgctaatatcagacgttgggtgttgcgatcgctcattcattgctttttccgtgtccatgtagaaaatatggaaaatataccgcagacatcagctattttagctgctaatcatctccatcattttgatcccttgattttactcgcagaaataccgactcaatcgtattattatattcttggtgatgcccgcactctctataataaatggtggaaacgcctgattttaggttttgcaggtggtgttattcctttggaacgcatttggggagaagaacaggctgttattgctgctgctgaagcgggaagggatgatttaaaggaactggcagaagttattaaaagtaccgttaatcctggtggaaatatccaaacagtccgccgcatagaccgcattgtttcggcaattttagcccgtggggatgggttgatgatttttcccgaaggtagactgggaaatgctgagggtcgtttgcatcccctaaaacggggaactgtaatttatgcgttgcgggctggagtgccaattgtacccatagcattaatcggcactcatgatttattttggagaaaaaagttaacaatttgggtaggtgaacctttgtattttcctgcaacttctcggccaaagcgtcaggaaatagatgtagctgtggaaactttggaacaagcaataagggatttgttacctacagattatcatgaaccggaggggataaagttgttacaacattttttgaatcggatgttgtggtaataagatttttgatcacgcagagtcgcagagtcgcagagaggaagaaaaaggaaataagcacccaaattgttatagtctattcctaaatttaaaaatccttaaccgcagttatttaaaatgcaaatagactttcaccacggtgttacctacgtagtggcacgactagcgggttttaaacatgaagatgctagtattatcgcttactgcgcccaatatgtagatgatgccattaatggcggtattattaaatttgataatggggcgatgtttacccgcatcagttcagcgcataagatgttagattatcgcaactttcaagaattagcaaattatcatgtgtggataccttttcattttttaccaggaaatgggggtaaaaaagcaggtgagaacccggaaggaaagtttattgaaaagttaatttgtcgtcctaatagtgatgttgcacagcagatggtaagggagtgtattcaatgtcgtcaaactgcttatagtttacatcgtttagggattacaatgcacgtttatgttgatacttgggcgcatcaaggttttgcaggtgttaaccatcgagttaatgaagcgaaaaaattacttgatgaaaatgacaaacctgataaaaatttgatggatagattgaaaaattattttgttagtgaagctttacctttaggacatggtgcggttttaagtcatcctgataaaccttatttacgttggggttatattaatggtagaggtgagaaaattagacgcaataatcctgaagattttttagaagctgctgataatatgtgtaaggctatgcagcgttatttattaggtgatgctgatgccattgtaccaggtttaccggaagcagataaaagtttaattgcttggatgttagaaaatattaaagataaaaatggtcatgcacgtcatcacaaatggttagatgctatttctcaaggtaaatttagttttggagatgctaatgtagactatattcctaaaggtcaagggtcttggaaatatcaagctttacgaactgaaaaagcagttgataaggataatgaaattttccactatcatcctagttttttagtcagtaattggaaattatttcacgacgctttacaagcacatcaattttatattattcatgatttattacctaaatatggcatttgtgtagcttaatttaggtgaattttagaccccaacttctggtattatattgtaaaaaagtcgggaatatttgcattttaaaatatggattaaattaatattccaactaaccaacagcaaaatttgtatagggtcgaattttgggatgacggaaaccaagtacaattaatttgataatcttgttcttgattaaaatctgtcctagttctattgtaaacaattatggtagatatcacgtcttgacatactcaatttattggataatgttgaaaaaactaaccttgcaacaatcctttaaagaaataaatcatgttcataaaaatcatttctatccacagcatgacgtgatccaaccatgctaaaatttgctctaatgggtgtttttcatacccgataaatgtagcggttgtctctatccagtcgggttttaatttatgtttttgttgttgtttttccgcttctctttcatttgcaaaactagattcaggtgttgatgatacagattttttgtttttaaaaaccttcctttcctttgtatttaatacttcttgatttttgtcttctgtggtgttagccttgatttctgctgtgatttccaaattaccaaataaatcaccccaagttaaccaagaatctccggttaactcagatgtttgaatttgccgagtatcaataaatgtgttaacagtttggttgggaatttcatgaaatttatagtctttttcatcttccctaagttggggaatttttctaccaccaaaaaagtaattaattgcagattcaattaaagctggaatattcaaagttggctgttctaaattatcagcatttacagaaatttctcccctagcttctacctgttctttcccataaataaagatatctaattgagttttggcaactttaataattccctgactttgttgttttacaggcacaattgctttagcttctaatttggctaaggctgtatctaaaaatgctaaaattttaccaggataagatttgatttctagggtgttttgattttcggtaacatttgttatactagaatctgaactattagttaatttgtttaaaatccggtcaatttctggtaataaattctgctctttttgggctgctactaattgtaaaacttgggaatattcggcaatttcttgattaattgtatcatttaattttctttgttgggatattgtcaaaacatcaaaaactttgttattgtcgctgacaagtaccaaatctctagtttctaatttgacagcaattccctgtacagtggggatatgatgctgtaaagtattttctgatggtaatttcggcgctttttgagtttgcaaccacccaaaactatgagtgattttttcccaggttttacctaagaaacctgaagatttgacattttgtaaagtttctgattcagcagcggcagcagatggtaaatttttaactaattctatgacgttctgaataggcgtgtctgctggtgggggagtatgggattttaagtatgtttgggtggtcttagctgaagtttgtaatttctttcctggttgtttatcaggctgcaatgcttgatacagtggataaagtaacgcctctacactccattttgtagcaacttgtaagttacggatggtactttctaatttttgactcaaccgccgagattgctgattgaagaagttaaatactttactttgataaggacgagatgaactggaggacatgatatcaatataattagtctgtaattaggctgagttttgattaattttgccgattcttgtgaaatgtgattgcccgtaacttgtgattgagatttagttagtgatataatcataactgaaaataaattcagatgagtttaattttgacaatctcaatttatgtttaagttctgagcgtggttttctcttgtgaattttcattgttgattttctctaacttttcattttactcctatggatactacatctatatcaaagactgttgaaaatttacgctctttatgtcaaattaatatcctttcttcttgggtttatcagcaaggtaatttagaagttaatgagttagaagttaatgaggtagtaaattctgatctatctgactggcaatctgttaagataaatcagaaaaatcaggttgtttgggatgggggaaaacaggttctttggttagcgcaaaggttcactgttcctgaaagtttgcaaggttatcctttatctggtttgtctttgcggttgtctttgctttggtgggctgatgcggttgaggtttatgttaatggtaatctggttttaattggggatttatttgattgttccccacgggtgcttttaagtcaaggggtaaaaccgggtgatgcgttttttgtttgtttgcggttggtgagtcctggtcattgtgatggtgctttggtgcgatcgcttttaatttttgagtctttgggttacaatgatgtagacccgggtattgtggctgatgagttggctattactcatgttcttttggaaaggttttcaccgcagggtttagctggtttggttgcgggggttgatgaggtaaggaaccgcaaaggcgcaaagaacgcaaaggaagagagggaagaagaagattggaagaatgttgtttttaacctacgtcagcttttacttcaatccaaaatccaaaatctaaaatctaaaatatatttgttgggtcatgctcatttagatttagcatggttatggcctgtttcagaaacttggaacgctgcacaaaatacttttgagtcggttttaaggttacaatcagatttttctgagttaatattctgtcattctactcctgctttgtatgcttgggttgaggaaaatcgtcctctgttatttcgggagattcaaagtcaggtaaaatctggaaggtgggaggttttggggggtttctgggttgaaccagatttgaatttgatctctggtgagtctattgttagacaattattatatggtcagcgttattttttgcagaagtttggaaaaatatctcccatagtttgggtccctgatacttttggtttttgtgcaactttaccacagtttttggtaaatgcaggggttgagttttttgttactcaaaagctacgctggaatgatactactaaatttgattatggtttattttggtggcgatcgccagatggtagtcaaatattaagttatatgtctgctctcatcggggaaactattgatccggttaagatgactcaatatctgtgtgagtggcaaactcaaacgggtttatatgatgcgctttggcttcctggtgtcggtgatcatggtggtggtcctactcgtgatatgctagaagtagcacgacgctgggaacattcccccattttacccaagttgcaattttccaccgccgaaaattatctacaacatataaaattagactcggaaaatttacccgcacctctcccaatatgggaagatgagttatatttggaatttcatcgcggatgttatacgactcacgcagatcaaaaacgctacaatcgtaaatctgaacatctattatatcaagctgagttattcgcaactctggcaacttctatatatggttgtgaatatccgaaaatggaaatagaaacttcttggaaaaaagttctgtttaaccagtttcacgatattttacccggttcttctattacccaagtttatcacgatgcgttaccggagtgggaagaagttcaacaagtgggaaatagaattttagatgatgctttaagggcgatcgcatctcacattactttaccacaaccacccgaacctaatactattcctataataatttttaactctctcaactgggagcgatcggaagttatacatattataatgaaccgcaaagaacgcaaagaacgcgaagtcaagagtgtttcagagggtgcttttgttagttcccatatttttagtttagaagatcagagttggaaagtttacgatgttcaaggaaatgaagttaccacccaacaaaccgcaaattctttattatttttcgcaactgtcccatctataggatatcaaatatattggctttctcccacatcggaaaaatcaaacattgcaaaaaacgaacttccgaaaaattggactttagaaaatgaatatctccaagtaaaaattaacccccaaaccggagatatagacagcatttttgataaaaaccaacaacgggaaatattaaacggtgcaggaaaccaactccaagcttttcaagatagtggacaatattgggacgcttggaatattgatccaaattatagcacaaaacccctacctccaagcgaattactatcaattcaatggttagaacatggagaaattcaacagaatttacaagtgattcgtaaaatcggtaaatctgaatttacccaaaattacatcttacaaaaaagtacccccatccttaaaattaataatactgtaaattggcaagaaaatcaagtattagttaaaaccagcttccctttaaattttaccaccgaaactgcaacttatgaaatcccctgcggagtcattaaccgcccaactaacccccaaaccaccgcagaacaagcaaaatgggaagtacccgctttacaatgggcggatttaaccacagaaacagatagcggaaaatacggttttagcttactcaatgattgtaaatatggatacgatgttaaacccaatcaaatccgtctgacattattaagaagtcccaactggccagacccagaaacagatagaggaatacacgaatttacctatagtttatatcctcatcttggcagttggcaagaagcggaaacagtgaaaaaaggatatgaattaaatataccattaaatgtgttgataaatccagaaatcaaaaaatctgcatctggtattttaccgaatcaaagttttatcaaattagcagataataatttaattatcacagcttttaaagtcagtgaagatgatagtaaaaaaatcattttgcgtttttatgaatgtcatggagaaacagcagagttaggtttagaaagtgcatattttaggttaggggaagcggttgatttattggagaggaaggtaaatgaggaagttggaaaaatcgcaccttggaaaattggaagttttgaaatacttgtctgaatcaggattttcaggatggtaatttttagatggtttgtttgtgtttaaagttgtatttgtctgattcagacaaataaaatccccaacttcccaccaaaaatcatccaaaaacatcctgtaaatcctaaaatcctggttatcctgattcagacaagaatataatatagatataatttccactaaaaacctatgcaatccctcaacattacattaccagatacattagcaaatgctctcaatagttatatcaaagatcaggaaaatctattacctgctaatgatattattgaaaatgccatcatcgaatttttgagtcaacgtggttatttacctccaaaaaaaccaattaactttactcctacaactaaaggaagcggatttttggatacctcggtaaatcatgatcaaattctcgctaaacaaatatactcacaatcattaccaccaaacacaccttgagagctataattgctgacactggacccctttatgctgctatagatatagatgatcaatatcatcagcgttcaaaaactcaaatacaaagaatcaatgcagaaaatttaacaatcttagttccctttcctgtttatctagaaacatataatcttttgctatatcgtctgggaactgaacaagcaattaaatttgctagagattgtatagaatcagtttattttattaacccttcccaagaacagtatatagcagcagcagaaaagaccgctttttttccagatcaaaaaattactctctgtgatgctatcactgcgattttatctgaagaaatgaaattgcaaatatggacttatgactatcattttgatgttatgaaagtgcaggtatggcgttagaattggtttcatcctgtacatcctatcatggatcttcaactcccaacaaataatcattcaaaaacatcctataaatcctcaaatcctggacatcctgattcagacaaataaaatctccaacttcccaacaaacaatcatccaaaaacatcctgaaaatcctataatcctggttatcctgattctgacaaaaaaatcctcaaataaacaactatgaaacaccccaaactagaacaaattatgcaagaattatgcgataatttgcttgcaacttatcaaaatcaactcatagcagtaattctttttggttctcaagcgcgtggtgatgctactcccgattcagattttgtcctcctaataaaaattcttgataaatacctattttgcttttctttcttctgtctacataaagacttagagttaacattatgtcaaagttttccgtctgcggttcagttagtgatttttgagagaaacaatagctaaaattaataaccgcaggactttctacagtattatctaaaattctatcagccccaattttggtaacagcatcttcaaaactactcacaccccgactttcatcaggaatagtagttaaacagtcctttaaaaattttaaacaactgataaaattacttttacctgaaccattagaaccgataaaaatattcaaattatctaactctataggatgcggtagagacaaatttttataattcttattttcaataagttgtaaaataatttgattcataaatattcacctatatatatgagtcggggatcttaattttaacatccccaaagggtgggcatagcccaccatcatatcaaactaatcacgcttttaatcttcgtgatcctcaaaaggatcagctaattccctgcttggtggaccaaaggatgtgtaaattgccataccagtaatagcaatcaggatggcagaaaaagaaacaccaagaactaaaccaggttctaagtccataaatttagagttatattatgagcgttatcttctagagtattacaaaacttaacgtaaatactatattctccattcattaaagtcaggtaaaccgccctaccctgatagtggtattatcgtcatagtcagaatcatcccaaacgtaaggttaaaatcctgctgaaatattgcagcaccctacagaggggaataaaaaaataaaaaaagttttggcaactgatcttaggtgaactatggcacaacggactaaattgggagatatcctcagacccttaaacgctgaatatggtaaagtatcccccggttggggaacaacacctttaatgggtgtttttatgggtttatttttcgtgttcttgctcattattctgcaagtttacaacaagtctctgttaattcaagatgtacttgtagactggcgcagtttaggcggctaattgctacacagctattataacttggatacaagttaatatagacccggcctgtccgggtttttcagttaatagggaacagggaacttttaacagggaacggataaagaatttttctcccagtccccagcgatgcactgagcttgtcgaagtgtccccagtccccagtccccagtcacctgatatatttgaagatgagctaaaggaaaaaaaataatgaatatatttggtattggtttgccagaaatggctgtaattatggtagtagctttattaatctttggtcctaagaaactaccagaaatcggtcgtagtttgggtaaaaccattcgcagtttccaagatgcttctaatgagtttcaaaacgaatttaagaaagaagcggaaaaactagaccaacctgtaaaaaccactgctgaactcgaacctaaacaaatagaatctactaaacaggataattctgtctaaaattctccaaatttcagatttatcctctaaattaacccaaaatccaaaaatcggatgacagaagctgttaagcaacctgctttggttattccccagttaatagtcgggttggggaatccagagcctaagtatgatcaaacacgccataatattggttttgcggctattgatgctcttgcccacgcttggcaattttctttaaccgaaaatcgtaagtttcaaggacattttgcagaaggtttagcacctggaggcggtaaaattcggcttgtaaaaccgctaacttacatgaaccgttccgggcaatcagtccaagcggtaataagttggtataaaatacctcctgaatctgtgttagtcatttatgatgatatggatttaccgttagggaaaactcgcctgcgtttatctggttcagcaggtggacataatgggatgaagagtattatttcccatttaaatagtcaaaacttcccccgcttacgcatcggtattggtaaacccaaaggtgcagcaaatgatgataatgctgacacggtttctcatgttttgggaaagttctctgctacagaatcaaaattaatgaatgtggttttagactttgtggttgagtgtgcagaactcacattaaagcaaggtgtagaaaaagccatgaaccgttgtaatagctggagtgctgagggataggagttaggagaaggagttcaggagtcaggagtcaggagtcagaaagtaaatatttatccccagtcaccagtcaccagtcaccagtcaccaatcaccagtcaccatttttgttagatggaaagcgatttccgctaactccatctaagcaagacaaaaggcttacgcactaagttccaccaataaaattacaccccatcaggggtgtgtcgcagcttcctgaattattttaagaacatggtaaaggtattgtgcttgattgataaggatatctcaagcaatccattaccaaaccgaataggtttatttaaaacggcgtttccgtctagctgcgactgctttacgtttgcgcttttccaggggggtttcaaagtgacgatgatactttacgtcagccaaaattccagctttggaaacctggcgtttaaaccgacgcagggctgaatctattccttcgttttctcctagaaccacttgggtcattctgggtctttcctcaatttgtcaattatctccattgtaatattagccgcaaacttagcaaaactatatagtgtcatagtgtcaaacgagtttgatcttattttggaattaactatcttgcccatttaagctgattcataaatattttaaaataattaaaattaattaaaatttttacatccttaacttgtaattaaacccacattccgcaccctgatctggcacatagagaaattacggaaataagaaaggaaactgagcctaaaaaatcacatattagcgaaaaaatacattgttgaaaaagaaaaacaccaaaaatgcc

SEQ ID NO: 40 - DNA, 48375 bp, Sphaerospermopsis sp. LEGE 00249
  LEGE00249_55
caccattttctatataatctattactttttgtcttaaatctaaactataagccatgatttctactcccataccttctctcttcaatcttatactctttttgtctcattcttaagttaaactactatagtagtgctattgtcggtgctaagactttatctgaattttgtaaagatttagaagattctggtcgtaataaaaacttagcagaagccccatcaaaattatccaaagcaatgacagaatatcaaagagttgaagcagctttacagctagaatgtgagtaataggcaagagtcaaaaggcaggatcgaagacgttttgaaggtacttaacttttatgtatgtactttgtttctagtcattagacatctccaaaatagaatgtattaatttgtcataagttgtaggggcgaagcttatgggcgataatttaacggaaaaatcagacatctagatatcccataagcttcgacctgcccccataaataagttccataatttcttttctggagatgtctattatattaatttaattgattgaatttattgaattattcttatgctttcactgtcccctactcttcaagctcgactttcccaacctttaaaaatcggctcatttgaagtcaaaagccgggtgctacaatcaccattatccggggtgacagatttggtatttcggcgtttagtgcggcgttatgcaccagattcaatgatgtatacggaaatggtaaacgccacggggttgcattatgtcaaacaactaccaaaaattatggaggtagaccccaacgaacgccctattagtattcagttatttgattgtcgtcctgattttttagccgaagcagcagttaaagcagtagcagaaggtgcggatactgttgatattaatatgggttgtccagttaataaaatcactaaaaatggtggtggttcttccttattaagacaaccggaagtagctgaagctattgtgcgggaagttgtgaaagctgttgatgttcccgtaaccgtgaaaacccgcattggttggaatgataaagaaattaccattcttgactttgctaaaagaatggaagatgcgggtgcaaaaatgattaccgtgcatggtagaacccgcgctcaaggttacaatggtaacgctcgttgggaatggatagccaaggtaaaagaaatcttatctattcctgtaattggaaatggggatattttctcagttgaagcggcggtaagatgtttagaagaaaccggtgcagatggggtgatgtgttcccgtggaactttgggttatccgtttttagtcggtgaagttgaccatttcttaaagactggggaattattaccagcgcctacacccatagaacgtttacaatgtgccagagaacatctttatgctttatgggagtataaaggcgatcgcggagttcgtcaagcccgtaaacatctcacctggtatgctaaaggtttcacgggtgcagcagacctgcgcggacaattaagtttagtagaaaccgtgcaacaaggtttagatttaattgataaagcaatagaaaaaatatcctccggttatgaaccagaagattggggactggggactggggactggggactgggaaaaaattttagattttagattttagattttagattggagttatttgtattcttcccaatcaccaatcaccaatcaccaatcaccaatcaccaatcaccaatcaccaatcaccaatcaccaatcaccaatcaccaatcaccgcttacttactctcagtaaaatcagcatcaatcacatcatcaccaccaccggaaggaggagtagaaccaccaccagcaccgggactttcagcaccaggagcagcaccaccaccagcttgttgatagatattgctacctactgcaaacaacgcttgttgcaattctggtgtgagtttcttgatttgctcatcatcttccttagctactgcttcccgcaaatctttcaccaaagcttgaaccttggttttatcagcttctggaactttatcacctaattcttccaattgcttctcagcttggtaagctaaagagtcagcttggttcttgcgttcaattttctcacgacgttctttgtccgcagatgcgttgcgttcagcttcctgtaccatgcgttccacatcatttttatccaaggtggaagcaccagtaatgctgatagattgttccttaccagttcccttatcttttgcagtaacgttgaggataccgttagcatcaatgtcaaaggtaacttcaatttgaggtacaccacggggagcaggaggaataccatctaagcggaaagttcccaaactcttgttatcgttagcaaactcccgttcaccttgcagaacatgaatttctacgttggtttgaccatcaaccgcagtggagaatacctcagattttttggtaggaatagttgtgttacgaggaataatcttggtcatcactccacccaaggtttccacacccaaggatagaggagttacgtctaacaacaagatacctgtaacgtcaccagcaagcacacccgcttgaatagcagcacccacagctaccacttcatcagggttaacgctttggttagggtctttacccaacacccgttttactacttcctgaactgcgggaatacgagtagaaccaccaactaaaacaacttcatcaatattgctcttatttaacttggcatctctgagagcattttctacaggaatgcgacaacggtcaattaaatcggaacaaagttcttcaaaagttgcacgagttaaagtagtatccaggtgttttggaccatcctgggtagcggtaatgaagggaaggttaatttccgcttgggtaacgctggatagttcaattttggctttttccgcagcttcagtcagacgttgtaaagcttgtttatctttgcggaggtcaataccttctgcttttttgaattgttctgctaagaagtcaactatttttttatcgaagtcgtcaccacccaagtgggtatcaccagaggttgctaatacttcaaatacaccatcaccaacttctaatacagatacgtcgaatgtaccaccacctaagtcaaataccaggatggtttcgttgctctttttatcaaaaccgtaagctagagaagcggcggtaggttcgttgataatccgtaatacttcaataccagcgattttaccagcgtctttggttgcttgacgttgggagtcgttgaaataagcaggaacggtgatcactgcttgggtaacggtttcacccagatatttactagcgtcttctaccagtttgcggagaactttagcggaaatttcttctggtgcaaattgcttaccagcaccgggagaatctagtttaacgttaccactgctgctgagaactttataagaaacttctgtagcttcgttggtaacttcgtcaaaacggcgaccgatgaaacgttttacagaataaaaagtattttcggggttcatcaccgcttgacgtttagcgatttgaccgactaaattatcaccatttttcgcaaacgccacaacagatggcgtggttctaaaaccttcagcgttagcaattacagtgggtttaccaccttccatcactgctacgcaagagttagttgtacctaagtcaattcctactacttttgccattttgggtgctgcttccgtataactacaaatgaatgggattataaaggactaaatgtttgaaccttatatttgaaccttatgtttgaaccttttgaaccaactgattgaaaataagcagtcagtccagcatggttgcgctagtctggggtgaaaaccccaaattacgctgatatatatactgaacttatgtagccagtccatgaagggtggtttcccgaacctcccgaaccttggatgggacggtttattttaaaggttgtttttagttggttcatggattgaactgctgttactctgaataatgtatgagaattaatacgttcaggaattggggtgaaccgtaatttctaagtcgtatttgccgtcaaagtgggataatggtgattggtgactggtgattggtgattggggagagaataaataatgatggtaaatcagcaacaagtaggtcaacataattaaaagtaaaatagaagtgtataaagtggacatatccctgatttcttcaagaagttggggatatggatattacgttttttcaggttgagttacttagcaaaagtaaaatttttgaattatccacagtgaaaactgacagcatattttaccgactttttcaagagtttccgagtatattttttgaattaattggtcagaaaacacaaaccgcagcggcctataaattctcatctgtggaaattaaacaaaccgcttttcgcatagatggggtttttctaccaaaacaagatgtacaaaacccgatttatttcgtggaagtgcagtttcaagacgatgcgcgaatttattaccgtttattctcggaagtttttttatacctacgtcaatatcaacctcaaaatccttggaggggggttgttatttatcccagtcgcaatttagatacagcagatactcaacattacagtgaatttttcaccagtcagcgtgtcagccgaatttatctagatgaactgggtgaaagtgcatctttacccattggtattgctacgataaaattaatcatcgaagatgaaaacaaaacaattaccacagctaaagagttaatcaacagaaccaagcaagaaatcaataacgacaaacaacaaaagttattagaattagtagaaactatcttggtttacaagtttcctagaatgagtagaaaggagatggaagctatgtttagtctaagtgatttgaaacaaacaaaggtttatcaagaaggacgtgaagaaggaagagaagaaggaagcttggaagcaaaattagaagctgttcctagattattagctttaaatttgacagtggaacaaatcgcccaagctttgaatttaacagttgaaactgtgcaaaaaattgctgaagggatgcaaaattagtaagtaatcagtcatcagtaatcagctattatttgggattgatgaggaattttagctgattgctgactgctgatagctgaatgctaggataaatcggcaattaatttaataactctttcctttacctcatctctgatacgccgaaatgtgtcaatattctcaccttgaggatcatctaattgccaatctgcaaacacttctcttaataaccattcctggggtaaatttaccccacaaccacataaagaaatcacagcatcaaaatcttctgggttaaagtttgtgaaaggtttagaagtttgatcactaatatcaatacccacttctaacataacttgtacagtaatcggatctacttcactggctgctaaaccagaactataaacttctatttttccctgtcccaaagttttagcaaaaccttccgccatttgagaacgacgggaatttttattacatacaaacattacttttttcatggttttttaattgataaacaaccaacacagaagacacagactggaaaaatcaaacctgatatgtttgataacatctaataccaattctgtatgaagatgcacaaaattatataacgaaccgcaaagaacgcaaaggacacaaagtgaagagagttttagagagtttttggagtggctaagtttattttttctttcattggtatgctcctgttttctcctaaatcttgatcaactaattattagcactaaaaacattaatacaacgcggatctggtaatgtcgctttttccggttctctgggaaaccatgctgctgtgcgtttacaaaattctaccaacatcaacataactggaacttcaattaaaacccctaccactgttgctaatgctgcaccagaatttaaaccaaataacattacagcagtagctatggcaacttcaaaatgattactagcaccaattaaagctgctggggctgcatcttcataggatatatttaattttaatgcggctacataactaattaaaaaaatgaaattagtttggataaacaaaggaacagctattaataaaatatgcaaaggatttttaacaattaattctcctttgaaagcaaatagcaaaactaaagtaattaacaaagctgaaattgccacaggagaaagatattttaaaaattgtctttcaaaccattgtctacctttatatttaaaaatccaataacggctatacattcccgctgctaaaggcaacccgacataaattaacaccgataaaacaatagtttgccaaggtactgttaaatcatttgctgctagtaaccatcgccccaagggtgcatataaaaatagcatcgttaaagaattaactgctaccattactaatgtatgaccttgatttccataggcaagatatccccacattaaaaccattgcggtacaaggcgcaattcctaataaaatcgtaccagctatgtaggaattagctaaactaatttcactacctctaattatttctgtacctgtaattaatggtttaaataaccaacctaaaaagaactgagaaaatactaccattgtgaatggtttaattaaccaattcatgactaaagtcagaattacaggttttggcgcacgcagggcatttacagcttgggtaaaatctatttttaccatgatggggtacatcatgaaaaatagacagatagcaataggaatggaaacttgataaacactaatagcgtcaagtgtgacagcaatacctggaaatatccgacctaaagcaattcctactaagatacaaataaacacccaaacagtgaggtatttttcaaaaaagctgagattgcttttagccttgattggagttatattgtctccgtgatgtagattcatatagtcctccaaaactctaataaattcacagcaacattacacactcaaggaaattataatctgtcacctgtcacccaatactgttcggttaaagatttttgtaggttgggttgaacaaagtgaaacccaacaaatgtctataaatgttgggtttcgttcctcaacccaacctacagaattttatttttttggcttaaccgaaaagtgttgacctgtcacctaatttctattccccatctccacctttccaagcaatatttttactaggttgggggttaggtaacttgagagaaactaaagctgctgctaagacaaaaaccattgatgtccacagacaaccaactaaaccaaataattgataaactaaaccggataatactgtacctgcaagacgaccaccggagttagccatataatagaaaccaacgtttaaggctactttatcatcatcagtaaatgccaaaaccaggtaagaatgaactgcggaattaaaggcaaataccacaccaaataaaagtagtccactaataataactatattagcaggtaaattgatttggagagcaagagcgatcgcacaaggaacagcagttaaagtaaatgtccaaaactggatagtttgagattccggtggacgaccagaaccgaatttttgtaataaattaggtgctaaaaattgcacaattccatagccaattacccaacaagctaaaaacccacccacttgataaaaagaccaacctaaaacttcacgtaaaaatacaggtaaacccactacaaaccacacatcccgcgaaccaaatagaaagaacctagccgcagataaaatattaatttcctgacttttagaaaacagttgactaaatttaaccttcttcttaattttgcccataccctggggtaataataaaccagtgaacataattaaaaatagtccacctgccataattaacaaagcattgacaaaaccaaatacagataacaaagcactaccaacaaaaaaaccaacgccttttaaagcatttttagaacccgttaaaacagccacccatttaaacaaagaagactgggcatcttgaggaacaaccaaacgaatagcacttttagaactcatcttagttaaatctttagcaatgcctgaaaatgcctgggctaccattacataaaaaactgcaaaccactgcacccactcaggatttaaaaaagacaacattaccaaagaaaaaacctgtaaaccgataccactataaagagtaactttcaatccaaattgcgaacctatccaaccgcccaaaaaattagtaacaattccaaaaacctcataaaacagaaataaaaacgcaatttgtaaaggtgtataaccgattttattgaaatacaataaaaccaacatccgcaaagcaccatcagtaacagtaaaaccccaataagccagggtaactaaagcataatttcttaaatttgcacccgaaccagtagtagaagccatgattaaaatctctaattttctttatctctctgcgtctctgcgtgagaaaaaatatttagggtaggaaacccaccctttaaaaaccattatttctgcaaacttaaagccacttttttagctaattccgccatccggttagcataaccccattcattatcataccaagctaaaattttcacctgagtttcatcaacaaccatcgtagaaagggcatcaataatggaagaacgaggatcatctttatagtcaattgacactaaaggacgttcttcataacccaaaattccctttaatggttcttgttcggaagctgctttcaataaaccattaatttctgctattgttgtgggtctcacaacttcaaaaacacaatctgttaaggaagcattcaacaaaggaacacgcacagctaaaccattcaatttaccatttaattctggataaattaaaccgatggctgtagctgaaccagtagatgtaggaattaatgaaagacttgttgccctagcccgacgcaaatctttatgaggtgcatcaacaatagtttgagtgttagtattatcgtgaattgtggtaataattccgtgcttaattcctaagccttcatgaattactttgacgacaggtgctaaacagttggtagtacaagaggcggcggttaaaagatgatgtttttcagcttcataaaggtgatcatttacccccataacaatatttaacgcccctgcttttacaggtgctgcaacaattactttttgcacacctcttttgaaataagggttaagagtttctggacttctaaactttcctgaacattctaaaacaatatcaactccaaattcttcccaaggaacttcaccaggttgggaatattcactaaaagttaagggtttattatcaataaatactctgttttctacagcttcaacttctttttcccactttccatgtacagaatcaaatttgagtaaatgcgctgctgttactgcaccacctttaagttcatttatatgtacaaattctatttctggccaactccaagcagcgcgaactgctaaacgtcccatgcggccaaagccattaattcctacacgaattgtcattttaaaattccttttgtttacgtaataattccccgatggttaaatcaaattctgatttaccagcaaatactgttccggctttaccgttatgtaaatgcacataatcaattttgtaggcttcctctgataaaggtacagaacctacagaattaactattgttggtgctttttgtaaatagaaatctacaaatttataaatatctccctggttttgattagaccaaatatttacatatataaataaaggtctagacagtggttgatatttagatttttctactgtttcttgtgatggtaaaattgcccctttaccgttattaacagctaccacttttaatttatcttggtttttttcatagtaagcgtaaccaaaataacccaaggcgttgggatctttgttgatgccttctactaaaacatcgtcgtcttcgctggctgtgtagtcgttgcggctggttgtttctttacccagaattgcttctgtaaagtagtcaaatgtaccagattttttacccgcaccgtataaattcagaggacgatctggccaagaactacgtatttgattccatttggtaatttttccttcggccgcagcttcccacattttttttaattctgctacggtaatatcttttgcccagtcattttgcggatgtacggcaatggttaaggcatcgaaagcaatgggtaattctatgtatttgataccattcttattacacattgccatctccgcttgagaaattggtcgagaggcattatttatatctgttttaccatcacagaatttttcaaaccctcccccagtaccggaaatgtttacttgtacttgggtgttgtttttggtgttggctgtaaattctttggcgatcgcctgggtaatgggatatactgtacttgaaccgtcaattttaatgattgatacagtcccggaagtagcggctgttgcagtttgtggtgactgctgaatattgctggaagtgtcaggtgtactggtacaactgctggctaatgctaacattcccaccgctaggactaatctttgtgccgttgttttcactgactttacctgtctgcttgataatatatctttgtattcatcatttcaaaaaaatttgatatgtcaagtacgaggatagcataatacataaaaattaatcaaaaaaaattgatggattgggtactgaaaactgggaagaggttttgctagtgttgcttactcacaacaagaacgacggggagaaagtacagaattacggtgaatatcggctaaatactgttctaaaacctgaaattgaggtaagttgagactataataaatccaacgtccttcttgacgggaattaacgagatttgcttctttgagatttttcaggtgaaaggatagttttgattgactgatatctaaaatatcgcatagatcacagacacagagttcacggtgacggagtaattctattactttaattctaatgggttctgatagggcgtgaaagccggcaattattaagtgtgggggtgtggttgtgggggtgatcatttatttctcaaatactaaagaggattcctatataaagataggacacagtataaccaatcaagttatattataaaagttatacagtcttttgccacagtttatgatctgctgcttaaatccagagtgtacccaacctatcaaccctgatgataacaaattctgtcaaacttgcagaactcccttaataccattattaatcaatcgctttcgggttttgcgggtgctatctactgaaggtggttttggtagaaattatttagcggaagatactcagaaactgaatgaaacttgtgttatcaagcaatttgcacccaaacaatcaggaagttacgcattaaaaaaagcggttgaattatttaacgcagaagctaaactattacaagatttaggtgaacatccccaaatacctgcgctgtttgcttattttgaagataacggttttctgtatttagtgcagcagtttattaaaggtgaaaatttattcaatgaattaacccaaaaaggaacatataacgaaactcaaattaaagaattattactagatttattaccagttttaaaatttattcatgagcgtgatgtaattcatcgagatattaaacctcagaatatcatgcgccgagaaagtgaggtaaattggtgttaattgattttggcgcatctaaagaattaacatctacagttcacactcaaatggggacaactatcggttcttatggttatagtccttatgaacaaattaagggtggtaaagcttatccagcaagtgatttatttgctttaggtgtaacttgttttcatctattaacaggaaattcaccttttgaactttgggcgaaaaatggttttgcatgggtggtggattggcggaaatattcatctaattctgtcagtaaggaactgggtacagttttagataagttgttgaaatttgatgttaatgaacgttatcaatctgcggatgaagttattaaagatttagaagttccagagacactttcaacccgtcgtgattttctcaaaactacaggtttagctattggtagtatcacgactttagggtttatatcatcaaagttatttgctgtaactccaggtaaagaatcaaattcaaattctctcaatacttttaattttgaagttgtcaccaccgacgcatcgggaaaaatcatcaataaacttaaatcgtctgcaaaatattttacagaagacttgggaaatggtgtcactttggaaatggtggaaataccaggaggaacatttatgatgggttcaccggaaactgaagcgcaacgagactccgatgaaagtccccaacatcaagtgactgtttctggttttttcatcggtaaatatgaagtgacacaaaaacaatatcaagcgattatgggaagtaacccttcttacttcaaaggtgaaaaccgtcctgtggaaagagtcagttgggatgatgcagttactttctgtgaaaagttaagcgaaaaaacaggaaaaaaatacactttacccagtgaagcacaatgggagtatgcttgtcgatccggcacgactacacctttttattttggtgaaagtattaccccagatttggtaaattatgatggtaattatccttatgcttctgctcctaaaggtttttatcgtcaacaaaccacaaatgtaggtacttttccccctaatgcttttggtttgtatgatatgcacggtaatgtatgggagtggtgtttggatagttatcatgataactataagaatgcgcctatagatggtagtgcttggattattaaaaacaacaaaattaagcaactgcgcggtggttcgtgggaatacaatgctacattttgctcttctgattctcgcttcaacctcgccgttgacaactatagctacactgtcggttttcgtgtggttttgatttctaagacttagtaaacagtcaatactgttcggttaaggatttttgtaggttgggttgaacaaagtgaaacccagcaaacacctgtaaatgttgggttatgccttcggcacactacgtgaacgttccattgctatggctcctgcgtcgccacgcaagctatcgcaacgctgacgcaaacaacccaacctacccaatctcatggttttgagcttaaccgacaagtattgagtaaacagttgcattttcgtcttattttctattactgtatttgtcagaatcaggatatccaggatttgaggatgtacaggatttttgtaatgtctattttcctaaattatttgataaattggttattgatattctgaaaatttgatgtttaatgatattcatttattaagattcactgaatgacattatattcattgataatcaatcatcataaatcctgattctgacaattaaaatctgaacaataacaaataactccccatcctgtaaatccttaaatcctggatatcctgattctgacaaaaattatctgcgttcatctgcgttcatctgcgttttctatcctgaaaatcctagatacccgacttctaatcaatacttgttatgtatgaacataattgaaaaaagaagtcggggatcttaaaaaaccaactttaattacacagaaacaaccgcttcctgttgataacaaattcctgcttctttgaatctttgtaaagcttcacccaagcgatcgcaatctgcaattaaactaattctcacatatccttcaccacctggaccaaaagcatttccaggagtcacaactacccctgttttttgcagtacatctaaagcaaaatctgtagaacccataccgacagtacaccttacccacaaatacatggtagctttacttttaggaatattccaacctaattttcctaaaccatctatcaagaaatctcgacgggtgcggtaacgagtttgcacttcttgtaaataagaatctggtaattctaaagcggtttctgctgctgtttgtaatgcggaaaaaatgccataatctaagttagtttttaaggttcttaaaccttgaataatgtgacgatttccgactacaaaaccaacccgccaacctgccatgttataagtttttgataaggtgtgaaattccacaccaatatcttttgcaccaggaatttctaataaacttgtaggttgataaccatcaaaagctaattctgcataacataaatcatgcactaacagaatttcatactttttagcaaaagcaacaatttcttcaaaaaattcacggggtgcggtggctgcggtgggattactgggataattgaaataaagaattttggctttttgtgctacttcttcagggatagaacttaaatcaattaaccagtcattttcttcctttaaagtgatattgtgaatgacaccaccagcgataattggaccacgaaaatggacggggtaagatggggatggtactaagacaatatcaccaggattgatataggcgatcgccaaatgtcctaaaccttccttagaacccaacaaaggtaaagcttcactatcaggatctaaaaccacattgtaacggcgattgtaccatttagtaattgccttgcggaaattagcagtaccttcaaagggtggataaccatgattagcaggattttgtaaagcttgcatcgctgcttctatcaccggttgaggtgttgcaccatcggggtttcccattcccaaatcaatcaaatctaaaccttgttctcttgcttttgctttgagttcatccaatctagcaaaaacataaggcggtaatttctgtattctttctgcgggagtaatccaacttaaactcattctaaaaacctcggaataggtgacaggtgacaggtgacaggtgacagtaagaaggtaaaaggtaagagtttatttttaccaattacccattacctattccctattgttaatttttaacttttaattgatttggtgcagtggtagaaaccattgcggccattaactgttctaaagcaacgggaaaaggtaatctgtgaatatcagaatttggtgctaaagtaatttctgcggacgtttgcaattcagttaaggtaatatttcctaatcccaaatctgctaatgttttgggtaatccaatctctgcataaaactttaataactgttgtcttgctgcatctgcaagttgattactttgtagcatttcttccaatcgcagttgtactaaaatcccataagctactttttcgccgtgaatgctaccatgtccgcagatatgggttaaaccattatgtactgcatgggcagctactgtacgacattgtgcgccacctaaaccaccgatgacaccggctaataatacggtagcatctacaacttctctccatacttcactaccaggagattgtaaagctgcggcggatttttgcagtaaaatatctcttaaaactcttgcttgttggactgcggcaataattaaagtttcttgtaaatgtccactacttactgacgcttcgtaccatttggcgatcgcatctccaatacctgcaactaatgtcctttgaggtgcagtttgaatcaaatcataatccaaaatcagtaaatcaggacaacggcataaacccacatcatacaaaaacgcccctgattcagaatatacattagataaagccgtccacgctgcacaggtagccgccgaagtaggaattgtgacaattggtaattgtaattgatgggcgactaacttagctgtatctaaagccttaccaccacctacaccaataatgatatctgctttatgttcctttgcagctttgcgtaaagcctttaaagttgcttcacagcagtctgcaccataagaactagcaaccgtatctaaattttcagcttggaaaatcggttgtaaactttcctgaaaaatactgagagtgcgatttccggcgacaattaaaggacgagttcccaaacgggtaatttccaccactgcggaagggagtacacccccaccccgaatgactttagccggagcgatggtcaatgtcaataatgtactagcggtttgagtagacaaggctggagtaagagattgattaggtatcataaataatatgtcaaaacttgatattcttcatacaatcagactaatgattcaggtttctggtagcgacatccatagaaagctattactaatagggaaaattcctaagttttaatatcttaatataaaattaatcttgattgtattgtaagtcacaaaaaaatctctggtttggtgaaaggctggtgcagtcaggatcacacctaatcaccaatcaccaatcaccattttaagctttagcttctggcaattgtgcaaatttatctaagtaaacttctacggacatttcaggatctgcacgagttaccaaagttcgttctaccttacccaagtaaactggtatagatattcctggttctgggtggataatggtacgggcgcgaattgtcagttggttgtttccgccagcacctaagcgcccataggaataaagattactggcagcttggcgtaaagttgcttctaattcttctggggtaatttctggtgttgtggcaattaccgcctggttagaaccgttatcataaactagggtgtatttaacagcaccgggaatgactgtccgactcagaggtactaaagacagggaaaataaacctgcggttaacacgatcataaagccggttgtacccaccagccgaaagcgtataccccatttgaggataaaagccaaaattgtcaggactgcaaacgctatggtagcaattcctgaccattgggtgtattggagaaaatcagctgttgtaggcataaggttttaattacggatatacccattttactaaaaaaatgggtcgaaagccttgcccttctaaggtggggggtatgtcaatagacctctccaaaatagaatgtattaatttgtcataagttgtaggggtgaagcttatggtaaaacggaagaaaaaacaaatgcagtttgattaattaagattggttaaatgggcgttaggtctagttagcaggaggtacaaagttttcatgtaacaagctgacggatagctgttccctgttgataactgatacaaaaaattattgccaattcaggtaagctgaaaacagcagttttcatccttaaaaccatgacagtcaaacatcccgcaattttagccttagactttgatggagtgatttgcgatggactaattgaatattttgaagtagcttggcgtacttattgtcaaatttggtcttctagtaagaagacatcatcagaaaatttagctcaaagattttatcgtttacgtcctgtaattgaaactggttgggaaatgcctgttttaattaaagctttaattaatggttttactgatgaggaaattttacaagattggttaaaaattaccccagcaattttaacggcagatcatctagaagctaaagaaatcatgaaaaaactagatggtttacgggatgaatggatagcaacagatttagagggttggttaagtttgcataagttctatccaggggtgatagaaagattaaaattaactcttgcaagtggagtacaattatttattgtcaccacaaaagaagggcgttttgttaagcagttgttacaacaagaaggggttaatttaccagatacagcgattttcggtaaggaagtaaaacgcccaaaatacgagactttacgagaattaatttcacaggaaaaaattaaatatgaaaatttatggtttgtggaagatagactcaaaaccttagagttagttaaacagcaatctgatttaaaggatgtgcaactatttttagcagattggggttataatactcaaccagaacgggaagcaggacaaaatgattctcgtattcgggtaatttcactttctgatttttctcaagatttttctcattggtaaataattggtaaatattaattatcaggtgacaggtgacagtaagaagataatagtagttcagaagtcaggaataaaaataaatcttaccaatcatcaatcaccaatcaccaatcaccaatcaccaatcaccaattatgcttgatttaacaaaattagcgggacaaatgcaaggtttaagtcagcatctttccgcagaagttgctgaaagtaaccgccgtttagagttagcaaaggaacacttaaaacaagcttgtaaatgtcaacaagagttaatggaacgtcaagaaaaatggcgcgatcgcattctttttgctaatgctacacccatcgaacctttagaaacttgtattgatattcctgttcctcctaaagttcatactgtcatcgctaccgatggttcacaaattgcccctaaccatcatgaaattgcttattgttacttattaaatattggcagagtcgttttacattacggtcaaaataaacacccacttctcgatagtttaccggaagtattttataagccagaagatttgtatatcgctcgtcaatggggtttaagaaccgaagaatggatgagtaaccgccgtacagcttcggaaattacggtattatctgaattagcttgtagtgtaaaaaccgaagttccagctttagcaatggtggatggttcgttaatatactggtttttagatcaattaccaatggatgcacgcgatcgcatcttacccccaattttagcagcttggcaacaattacaaaaagccgaaattcccatcattggttatcttagcgccgcccgtaatcttgaatctacaaactttttacggttgttagcttgtccctatcccgtccctgactgtatcagttattgcccagatcaactagatcatgtaccatgtagaaaatttgaaaacctgcgagatacgactttatggacaacccagctaaaaccaggacaaaggggacccttatggcgcagtaataacaggattttacaactttatgaagaacaaacaatttatttttgttatgttcacgtaggtacggaaatttcccggatcgagtttcctgcttgggtagcaaatagttctcaaatgttagatcaagcattaggcttaatgttagcacaagtacaaaaaggatacggttatcctgtggcaattgcggaagcgcataatcaagctgtagtcagaggtggcgataaaaatcatttctttgcgcttttagaaagggaaatgattaaagctggtataaaaaatgttggtatttcttacaaagaagccagaaaacggggaagtatcgcgtaaaataattgataattgataattgataattgataattgataattgataatgcgtaattttaattttgaagattgagatccccgacttctcttattattctattttgagaagtcagggatctgaatttcatctatcacctatcacctatcacctatcacctctttatctacacattaaatcggaataacattacatccccttctttaacaatatattcctttccttcacttctcactaaacctttttcctttgcagcattcattgaaccatgagtgactaaatcatcataagcaacggtttctgcacgaataaaaccccgttcaaaatcagagtgaatcacacctgctgcttgaggtgcagacattccagcattaatagtccaagcgcgggtttctttaggtccagaagtaaaatatgtccgcaaacctaacagagtataagtagcacgaattaaagattttaaaccgccttcttttacacctaaagattcgagaaaatcggctttatcttcctctggtaattctactaattctgcttccacttgagcagaaactatgacaacttgagcattttctgtagatgcaacttctcggactttttctacaaattcattacccgttgctaagtcatcttcagaaacattagcagcgtaaataatgggtttatttgtcagtagtcctaaccccttaataatggctgcttcttcttcatttaaacttacttgacggactgatttaccttcatttaaagctgctgctaatttttccaaaacagtaatttcaaattgtgcatctttactggtgcgtgcttgtttacgagtgcgttcaatgcgtttttcaatttgcgctaaatctgataaacccagttctaaattaatagtttcaatatctcgcactgggtccacagaaccggcaacatgaatgatatcatcattttcaaaacaacgcacaacatgaactatggcatcaacttcgcggatgtgggataaaaattgatttcccaaaccttcaccttgacttgcaccttttaccaaaccagcaatatccacaaattccacacgcgcaggtataatttgttcagaattggcaagtttggcgagaacatttaaccggtcatctggtactgagacaatgccaacattcggttcaatggtacaaaaaggaaagttagcagcttcagctttagcgttagcgactacagcgttaaataaggttgattttccgacgttgggaagtccgactattccggctcttagcattttagatttttagatgttgaactccaattataggataattcaaacaggtttcgggatggtttggggaatgggtccgggtactgtttgcggtatgggttggggtatggtttggggaataggtccgggaacgggttctggtactggttctgggaacgcaggaggaatgtttggttgcgggggtggttcgggttttggtaggggttggggttcgggtatggaaatggcacagggataagtcatggtcattttggcgtgatgcgactttcccaagctagatgataccttaatttattggcatcttcccaaatggttatactcaaattttaaggatcacgattttcccacaattctaataacccaactgttcctacaaaaaatgtataaactgcatatttgatggggttgtgatttttagcaggtgcataaatagcggcgatgattccttcaataaaatgcgctgctagggcaatgtgagcaaggattaaaacgggatttaatacagttggtaattggtggctagttgtgattgtttcgatgttccatatttctaatcccattcccgcagtaattaaggggatggagataaatttgatgatggtgaatagtttttgtttgctagatttgatgtctttaaagttcatgttgtttgattttttcaactaagaatattctacattttatctcattaaattatttattaattcatcaattcttaaaagctcctaagtaatttgttgtaccgtatttagttcagttgccggatcaggggaaacgcatctaaattatcttgacaaaataccatattagtgaatcaagatagaaaaatatctaattccattcaaaatctgattaattccttagacatctccgaaaaagaattaaattatggtataacaaggtaaaatcgtgtatctaccctgagattatgagcaacatagttgagtataaatagtcaggtcaaattaatcaaaggtaaaaactatgactcaagcaattgatcaacatataattcaagaaaatatcctattagataaatttagaaatctaaccattgaagaacaacaaactattttagattttgtagaatttatgtacagaaaaaaaatagattaccagaaaatcaagaagtttctgcttatgatttagctaaagaatgggctggatctgtagatagtggaattggtgatttatctacaaataagaagtatcttcaaggatttggtaaataatgaaatcgaaaattattatagatacttctcctttggttgcttttattgataaaagtgataattttcatctgtggacggtagaaacatggaaaaatttatgtcctcctttattgcttaacgggtgacaaggtggctaaacagcttgtttcataagggatagagcctgaaagccacgttgaaaaaagaggcgtttatgcggcttgagagcgattaagttcagagctaaatcagcccataattccatgccataaatccataattgtccgtagagagcaaagccaaaatcactctgacgtgggtacttatcctagtgttgttgaatacgtccggcataaatctctatacctaattttttcatccgctgaccgtacatagtggccaaactataagcaataataatcaataagactaaagctaaaaaacgagtttcattcactttagtgtcctctaaattatagccacctgttttacaatctttaaagaactgttcaattccccatcggcatctataaagacataaagtttgtttcagagttggcagatttgttaaaatataccaaggttcttttggtcctttttgacgatattttctcttccaataaacagcaatattaaataagcctaattcatcccctttaccacatttaactccctcataaaacttcgacattcctggcttaaatccttggtttttaagcacttgatattcttgtcctgggttttcctgaaaatgaaggtctttcttctgacgtagagcaaagcacactccttgctcatcaagccatttagcaagttttggactatgaaattctctatctgctaacaccacaattcgacatttttttaacaactttattgccgtttttattaatcttttttgggtttgtaaattactatttccgacatgatttaatgtttcccaatatagtggtaaggcatgagtaccccataccaatgtcaccataaatatgtttcgccccttccactgtgttctatccaatgctaccatccaataaccatatttttgatattgttttttatgaaaataacgccgctgttctcgattcagttgctttggtgttaacgattgtctaatccaatattttatcaacggaaaccataataattttacgcagagtttccctattgctaaaaatctttgtagattgcgtttcctgctttcatattgaattggttggggaaataaacttgccaattttgacagttttacttggcgatgagcttgtatcaataacaacaatatctctagtgtcagatactgctgttcacttaaatgctttcggaaaattgtttgatatgattgtggtaacattttgttgttttgggggcttccttgcccctatttttttccctccttattttctcaaattattgccacatctcatcttcagcccccttgtcacccgttaaggtcaatcatataacaaaaaaagcgatcgctctctctccctacctacaccaaacagcgatcgctcctcatcccacttacatcaaacagcgatcgcacttccatcatccctaaaaaccgtgatcgcgtttctcattattccaaaacaaaggagtgcgcttgtctgtaatcacgtaaaaagcgattttgaaaataaaaattactaattaatcttcataatcttcatattttttaagttgtttatcttgagtatattcaggatcattaagatactcaattaattcttgtaaaacaattatatccatgctatctccacgtgtttcaagattagacattctatgtgtaacaccatgataaggtctatactccagatagtcttcatgtagtgtagttgtaatttgataatttttccgccactcttctcctgtttcccaaactacaaccaagtttatatctttggaattttttgttcctgtctctatatcctcaattaatccatttaatgaatacttgtactctaaaacttgaggtgcagactgaaatggtaatactttttgagattcataattttctaaattttcctcctgaactcctaaaggattttcgtttttatcataaatatgtaaatgatttttatctataactatcctatataaactatcataatcagaacgttcattcgttgccattattttgataccacgaataacgccaccagcaatcatctgattaaagagtgctattacatcttgttctcgagatggcatagatgtaatagaaatttcttgtgttgggttgaaaaagtttttattaactatatttaatggattttgttgttcatgttcttccatttcctttttccaatcatcaattcttttttgtattaatatatcctctctactttttccagtgccagtaggttttaaacatttatgatacctaaataaaacatctaccaaacgagaagcaattttttgtgcgagttcttgcaattgttttttatagctttttctacctaaatctggtgtatagttttcaaagtgaatcaaaacaaaagcattgttttgacgactaatattttgtcccaacggaatttgaattgtttctccttggggcatattatttgatgctaattgtattccaccagataaaactttatttcctattctatagcttaaatcacgactaaaattattccaatgattcactgaccaaacataagcacaatacacataaggtttatgtttttctagaagctctttttcctcttcttctaattttagttttagttccttatgagaatcagatgaggaaaaattccactcaccataaataaccgacttattcataaatgtcttaggtaattcattataatctttatgtctatctagtaattcttgtttcttttgctgtatggtttcataacaaatacattttgatttctgagtagtttcatgaatccatagataagtaggacttgttattgattctctagttaattttccatttttatcaaatacatctaaaataacctctaatttttcagtgggtttaatagatcctaatgcggttttaagtcttaaaacttttagccatgaactagcttctttcattcctacccaagtgaggtttttaggaaaagtatttttatcaaattcaagacaaatggaaacacctgtatcattattttccacaattgttctaaagtatggatctaaaggttctttatcaggagttacttgaggtcttcctaaagaattatcatcatcatctacccactctcttgcattaaccattttcccaacagcactataattagcagtttttgtacacagttgaatataattaaatccataggctaaataagtcgctccaacacctttatgtccacgatttttgttatttttaaaagaaaaaaatggagttaaaaatgatttgaattgtttttcatctaaacctgttccattatctgttaccattagtatatttttttgtaaattaatggtgatccaaatttttggaatataattatcctctttagtagcacgtttttctacagagtccatagaattttgaatagtttcagaaaagggatcgtaccatcctgcataggatgttaaaatacctttgatttgatttttaagggattttagttttacttctgcatcagcttcggtttttgcttcaagaggatcaaatgagtcaaaaggttggaatgattgcatagttagggtgtttttatcattgtgtgggtaattaagagtttggaatttattgatcaagttgaaacattaaattccacactattcaactataccagaaaatcttcaattttaagtattttctccacagtgataacccagcagcaaccctccaaacctctctaagccacagcaaactctgtaaacttccgagtttcaggatcatgaaaagctaaaacaatatcctcttttggtacaccttcccttaataactccgttgctattccttcctcagtccaatcttcctcaatgtaaatcttctgatttttaatacgaacataaacatgagtattattaactctttttttgttaacccaatcaatactacgccaaaaataatgatgattattgtcatcaaaaattaaacaattttccgggtgaaaatcaggagctttttcaacaatttgataatattctgttaagatttttttgattatttctccatatcttgtgagcttatccatgatacaatttcctcctgttcgttattaaaaacaataaactctacctgatggcgtttaacaatagctttaactgatttcctttgaaaaaaggtctcaaataccgtatctttgacagctaaataaattgcataatgtttttcagataaatctaaaatatcacgatatacaatatattgtcctaatgccaattcaaaatccctcatcggagaaggattaataaaactttttatttctacaacaatggtacgattattttgttcagctaataacgttttctccgcaagtagatcagcataaagttgggcatcttcgtattgtaaaaaataagaatcggctaaaattctccaaccatctttaattaaagcatttttaaccgcatcatggtagatatcctttgccatttttctccctagtttaagatcatttactcttccccacataacataaattataacatttcaggtgagtccatccagacccaccctcaactatattataccaaagctgcctgttcctccttactaatcaccctaccttcatcctcaaaaccaacaatttgatcaaaattcaaataacgatacaaattatccgcaaaaggatggattttctcacccacaatatccaaatattcctgcacattaggaagtcttcccaacaacgcacaaactgccgctaattctgccgatcctaaatacacttgtgcgccatttcccatgcgattattgaagttacgagtagaggtagaaaacacagtagtattatcttccactctcgcctgatttcccatacacaaactgcatccaggaatctcagttctcgcttttgcacctacgaaaacatcatacacaccttctacctttaattggtgttcatccattcttgtaggtggtgcgatccataaccttgcttttacctcacctgcaccttctaaaaccttggcagttgcccgataatgaccgatatttgtcatacaagaacctacgaaaacttcctgtactggatcattcgcaacttccgataataatttaacattatcggggtcattgggagcagcaacaattggttctttgatctcgtttaaatcaatctcaattatttctgcatattccgcatctctatcggctgacattaactgcgggttggctaaccatgcttccatttttgctactcttctcatgatggttcgcgcatcagaataaccccgtgctaccatattttttaacagggcaatatttgaccgcaaatattcggcaatggtttcttcactcaatttaattgtacatccagcacaagaacgttctgcggaagcatctgttaattcaaatgcttgttctacttttaaattgggtaaaccttcaatttccatgatccgtccagaaaaaacatttttcttgttctttttctcgacggttaataatcctttttggatggcaacataaggaatagcgttaacaatatctctcaaagttattcctggttgcaattctcctttaaatcttaccaaaactgattctggcatatctaaaggcattacacccaatgcacccgcaaacgcaactaacccagaacccgcaggaaaggatattcccaaggggaagcgggtgtgggagtctccacctgttcccacggtgtcgggtaacaacatccggtttaaccaggagtgaatgataccatccccaggacgcaacgctacaccaccacgggaggaaatgaagtctggtagttcttggtgggttttaatatccactggtttgggatatgctgcggtatggcagaaactctgcattactaagtctgcactgaaacctaaacaagcaagttcttttaactcatctctggtcatgggtcctgtagtgtcctgagaacccactgtagtcatgatgggttcgcaagaagtaccgggacgtacaccgggtaaaccgcacgccttcccgaccattttttgcgctaatgagaagccttttccagtatccttgggttgttgaggacggataaataaattgctgggttctaaacctaatgcttgacgggttttgtcggtgagggtacgtccaattaatagggggatacgtccaccggcgcgaacttcatctaaaatggtatcaggtttaagggtgaaggtggaaataacttctcccgcagcgttggtaatttcacctttgtaggggtaaattgtgatcacgtcaccggtttccattttggtgacatcgcattgtatgggtaatgcacctgcatcttcggctgtgttaaaaaagataggtgcgatcgcactacctaaaacgtaaccaccggcgcgtttattgggaacgaagggaatatcattacctaaatgccataatacagaattgattgctgacttacgagatgaacctgtaccgacaacatcaccgacgtaagctacaggatgtccttttttcttcaagtctgcaatggtgtctaaacttcccggttgacgggtttctaacattgctaaagcatgaaggggaatatcaggacgggtggtagcgtgagttgcgggtgataagtcgtcggtgttggtttctccaggaactttgaaaacggtaacggtgatagcttcgggaagtgtgggacgcacagtaaaccattctgctgctgcccaagagtctaccacttttttagcgaatttgttggttttagaaagttctaaaacatcgtgaaacgcatcataaactaagagaattttgcttaatgcggtggcagcgttttctgctacaggggaagaaagtaaattaatcagtgattgtacgttataaccgcctaccattgtacctagtaattctactgcttcgatagcagaaattaaaggactggtaatttctcctttagcaatagcagtgagaaaaccagctttaacgtaagcagcttgatctactccggggggtatgcgatcgcgtaataaatgtaataataactcttcttgtccttgggggggatttttgagtaattcacataattctgatgtttgttttgcatctaatggtaaggggggaataccaatttgggcgcgttcttgggtatgttgttgatattctgctaacatgatttagcttttctcctctcaatgtcttgttttctttattttattgtaaaggaaatgttacaggagttactggtaaacgaatttgtcagatataaacagtttatagtttataatcagattattaaaattttactaaatttaacttttatgtcagccagggatacctaccatgaagcaattaaaaatgccttaatcaaagatggttggatgattattcgtgatccttatactattaaatatgaggagatccaattatttgccgacttattagctgatagaactttagaaattgaacgtaatggacaacaaattattgtggaagtgaagagttttatcagtcgttcacccatgcgtgaatttgaaacagctttagggcaatatattatttatcgtaccttattaaaagtcattcttcctgaagctaaaatttatgtaggagtaagtcgtagtatttataaatctttctttctgcaaaaagcgatttcgtttatcatagaagaaaatggtttaagattaatagttgttgatttgaataaggaggaaataattcaatggataaattaaatctatatcgcaatgtgatcaagaaaattctcacagaatatgaacaattagcatcacaaacacctaatcctgaaggtgttgatagtatattagcatttgatgaacaaagagatcaatatctttggtttcaaacaggttggcagaatgatcataaaattagaggtattactgtttatgtgagaattaaaaatgagaaaatttacattgaggaagattggacagaagaaggtattgcaaatgagttattaaccgaaggtgtaccaaaggaagatattgttttagcttttcatgatccggaaactcggaagtttacagattttgctgtggcttaggtttaataatgtaggttataatagttacacagaatatttttaatatttaaaataagtggtgaattatgagaaaacctgataattggaatagcctgatagattcatttagtaactgtaattgtccctatgcttacatagtaagttattatctttcgagatttgataaagatgcttataccaaattaggttttggaaatcaaggggaaacacatataaaaatatcatccatatttgaaattccacctaatacattgaaaaattttagagacgcttttgatccttatcatgaaaataatcgtaaaggttggtggcagagagatttatggcgtgttgaaaaagaaatttttaatggatttaaaacatattctgaaaatgaattatatgagttagtatgtaaaattttaagtaatccaaaacaagattttaaatacttttttgattctgatcaattaaccagtgaaatagataatatcacactatttcctgatgaagtaaacgacacacaaattttaacagaaggatctgttagacaagtaacagttaatgcttatgaaagaaataatgaagctcgaaaaatatgtattgaatattatggtacaaattgttatgtatgtgggtttaactttgaaaaaatttatggtgaaatgggtaaagattttattcatgttcatcatttaattcctttatctaaaattaatcaagaatacggagttgatccaattaaagatttacgtccagtatgtcctaattgtcatgctatgatacatcggaaaaatccaccatataccatagaacaaattaaaaatattcttcaatagctgatatggtgaataggaaggaaaagtgatagcttaaggtctcattctcacaaataaacccatcctgtaaatccttaaatcctggacatcctgattctgacaatatgctataattagttaaccaatagatatcaagaaccaccaattatgaccacaaacatacacttccaagcaaaagtaaatcacgggaaaatcgaaattcccctggaatatcaagaagaaataaacagcgcggaaatagtcgaaattgtgattttacaacctatccccaaaaagaaacaattcccagcaacaggaataattagtaacttaaccacaaacccgatcaaaattgctaattttcaaccactgactagagaagaagcaaatgaacggtggtaatatgacaaaatactttattgattccaatatttggctttatcgttttatcttaaatagtagtgattccaacgccataaaaaagcaacaaatagctacaaccattaccagtcaagaaaatttattaatcagcacacaagttattaatgaagtttgtgcaaatttaattcgcaaagcaggttttgataactcacaaattaaaactttaacagaagaatttgcccaaggttgtgaaattttacccgtctccctagaaactattcaatatgcagcaaaattacgtgataactattctctctctttttgggatagtctaatagttgctagtgcaattttaggaaaagcaaatattctttactcagaagatatgcagcatagtttaatgattaataataccttacaaattgtcaatccatttttatcttaacatcctgaaaatccttaaatcctggacatcctgattctgacaaccaaaatcaagtctgaaaacccaatattgtcatcaattccatcaaagaaatagttagatcccagacttctggaaaaagtcagggatctgatgatagtcgaaagttgtggaggaattaacagcaatcaaccaaaccagttagaaggttgaaaacctggttgaattgtttcacaaaggtgttgactaataaactctgcttttgcttgcatgattgaaaaaatcccttggtgaatcaagttttgtagatgtaatttttgttctaaaggattacgggataacttgtgattgaaaaaactctctttgggattttcagcaaactctatttgactctcagaaactcgactatcaacaccaggaagacgatcaattacaaaagaaattagctcttgacgtaaatcaggaactgcaaaaacctgttgataaggttggtaggggtatgtatgcaaaacactttcaatttcactaataacagattgctgtgttaacttaactacggttttcatttgttcttatctccttttccatgcaaataaatgattggtgcaacaaaacatttatctcaatagcaatttggtaatgataagcagtgatcaccctttcccacaccatacccgacacccccaattcaagatttaatcttggcaagatatcagatgattcaaagttgatgatatttagttgtaatttatacctatttaaagatgttattttcaaataggaatccagctactgcttaattaccgatgttagagctatacaaatataattatttcatatttacgctattttggtgaaaaactacacaaaacgcagcataaactattagggatcaattttatttacctttatttacaaaaaattttgttaattatgcttaacctgaaagtaaagttaaactcacaataagatttacattacctctgatattatttctatatgaagctgctcctaattatgcccccgtctgtgggcttattttgtctttccccagaattatattctgagggaaaaattaaagtgtaatttacatattaaaaaaatcttaaaaagtccacatcttccatcaatagatgttgcagttgctgatcaatttcagcagcagcagctaatcccgaaaccattgctccttctaccaaatttccgccacaccaatcaccacaacaaactaaaggtaaaggagtattggcagataaacaaggtatatctaaaggagtacgaggaaaagcataacgccaacgatgtacttgcatccattgaggattttctaaccagggaagtgctaaattttctgctgctttttgcaacatatcattaccaacaggttgtaaatcttgggtttctagatgttgttgagcgaacttggcgctactttgtaacacaaaatgcggtggttgtgattggtgacgcttgctactatcgaatccaatccatgctaaatcagtatgatcattaaaggttaaagctttccaatggggtaagggttgagagttgggggaaaatcccgccatgacactaatacaagggtaaaactcaacagaatgcaaactatcgaaaaaatcagcacccaataaacttttacccaaaggcgctaataaatctccagcttggggtgcaggaatagcaactattaaagccttggcgtttaattgttcattattgtctaaagtaagataccaagcattttctgtggtaagattaatcttgatcacacgctgattaaataaaatctctaaaccaggagtgagaaatttagcaatactgctcattccctctggtgcaacataacgcggactacagtttgctggttgagatataccttcagtgatggaaaattcataaactatatctgtccagattttcagaatttgccgtttttgcaataattccacaaaattcgtgaataattcaccctttggcttgagataacaagcaccatgatccgcccaagtttcctgcaaacgccgtgtagcaactcttccccccacaccacgagatttttccaccactaaaaccccataaccagcttgacgtaaccgctgggcgcaaactaaaccagatatacccgcaccaatgacaacaatatcagtaatatgagaatttgacatatttcacaattcaaccttgacaataactattaaaagctaatagtagaatagggtacagactagcagcatggaagggaggatgggaaattggatgaactaagggcggtactagagttagccactgaagaagaactacaagacttaacagctattctgtttagtcgcaaatttaatcccctagattatgttcacacacccgaacccatcgtagtgcaaagccaagatcgtcaagcttggttagatgcaatagaaaaccgctttcgctttttagcggctgatgggatcacggtattacgggggcgcactgatcaagtaacttaccgacaagcattaattcaagtatgtaaatatttgaaaattccttattatgaggatttagcaactgttgatttagaagcagaggtatttttgcatcttttaggaaaggtgtggaaaaaattgccaaaacaagaacaacaaaaaattgccactaaaatacaacgtcagttattatcatcagaggagcaaaaaccattacctctgtcattacaaaaagatcctttaggattaattttcaaaggtggtagtgctttagctgtaacttccgtgattcagccttatgtacttcaacaaattgcccgtcaatttgccattcatttagctacctatcaagtagccaaagaagccgcaattacaggtacacaagtagccagcaaacagtttcaaagctatgtcacagcacaaatggcgcgaaggggaatgactgtaagtgcagcccgatatagtgcagttcgcacagtatttgctgttgtcggaccaatgatgtgggcttggttttttgctgatttaggttggagagcgatcgctactaactatggtcgcattattcccactattttcaccctcgcgcaaattcgtctcacccgtgcagaatgttgggagttagcttgaacaaggctttttatcatcctgattctagtttgcaacctgcgtggaacagtcttcaatttgggttgcttgttttccctgtcaatccatttttgggggctgtaactatttgtttggcatcattaataacttgggcgaaaaaataccgcaccattagccaaaaacccctgcacaaaggatttgcaagtttaagtttattgttgttgataactaccgggtttgcctctcataaattagaggctttcctgggtttattcaacttattaccttatttttttgtatttgccggattaacttccctaattcaaacacctgctcaattatggcgaatagcttggattatgatcataggttctttacctgtggtaattatcggttttggacaattatttttaggttggagttttaaaatacaatttctttgggtgttaatagatttgacaatttcccctggaggagatccacccggacgcatggcttctgtgttcatgcacgccaatactttagccgcttatttagtgacaatttttattttgggtttgggtttatggctagacaattatcaaaaactccaacaaaaaatcccacagaaaatcacaactaattaccgtcccattattttcttaacaatagcagtaattgcgaattttatagctttgattttaaccaactctagaaatgcttggggaatagcgattattacctgtttagcttatgctttatatcaaggttggcggttagttgtcgctggttttttgagtattgccactagcatattgttagcagcttttgcaccaggagcgatcgcgcaatttttccgtcgtttcgttccttattttatctgggcgcggttaaatgatcaaatgtaccctgatcgaccagtagcattaatgcgaaaaactcaatgggaatttgcttggaatttaacacaacaacatccctttacaggttggggtttacgcagttttagcggactctataaaaccaaaatgcaaattgatccaggtcatccccacaacttatttttaatgttatcagcagaaaccggtttaattaccactttgttattttgtgggttactcctatggattttaattattgctagtaaaactctatggaaatcagaatctttagaaccagaaaacagaatcatttttttcagttatctacttgcttttatcggttggataatatttaataccgtagatgtcacaacatttgatttacggttaagtacattattttgggtgtttttagctgccctatgcggtgtatgttatcagtataagtcacgtcatcataccaattctatgtaacaggatgtttgaaaagtgtttaatgtataaataaacccctctccaaacctctccccgccgcggggagaggctttgaaaccccccttccctacaagggaatgggggaaggggggttaggtttctagagattatcggtttcatctaatacttttcaaacaacctctaaggttgcgctatatttccgtagggacaattcatgaattgcccctaccatgtataatttgttgtaatttgaaaacaatcgttacaatacttaatttaatcgtgtaaatatttacaattaatatattgaccgacaacggttgtattacgatggattgattaacaataatacctcaactatctattctcacttaatcagtcctagtggacaaagtgtattctatgatgatgcagatagcgatcgcgctcccttcactctcacagaaacaggaacttacaaactaattattgatggttatttagataacacaggtgattacagtttccggttaattgatgctagtgcagctacaaatttagctttaaacactcaagttacaggtactcttgatccagggttagaaactgccatttaccgcattactggtactgctggacaaaaattacggtttgattctttaattactggttttgtgaatgggtattgcacactttataaaccaggtaatcaatatgttactagctactatcttggatctgactttgaagttgatttaccaggagatggcacttatttgttagttgttggtggctatacagcaaatgaaacagttaactataaattccaaattacggaggtttagataattttaggcgaggtgctttagcgaaacgcaccgaaggtatcgctttttgggatgtggggagtgcgatcgctttttgggatgtggggagtgcgatcgctgtttggggatgtggggagtgcgatcgcttttaggggatgtgggagggcgatcgctgttacaattaaagagattttggagggtatgaagcgatgatagttacagcaattagacccgtaacaatcgaagagtttttgcaattaccagaaacagaacctgcttccgaatttattaatggacagatcatacaaaaaccgatgcctcaaggggaacatagtcaacttcagattgacctctgcgaaagaattaatcaaattgccaaacctcaaaaaatcgccaaagcctttcccgaactacgctgtgtttttggtggattagcgatcgttcctgacatagctgtatttcgttgggagcgaattcctcgattgtcgtcaggacggattgccaatcgttttgaaatttatcccgattgggcgattgaaattctcttgcccgatcaaaaatataaacaagtcctagccaaactattacactgtgccgagtatgggacggaattgggatggttgctagatgctgaagatgaaagcattttagttgtagatagcgatcgccgagtgagggaatttaaaaatagtgatcgtctgcctgttcttacagggatttcattagagctaaacgttcaagaagtctttagctggttgattttttgacaggatcgcttttggggatgtggggagggcgatcgcgaagcacgacctaaaaatcatttgctaaaatagaagtaacttaaagttacaggaaaaacaaataaatgatcactttagaaatggcgatcgctaaaattaaacaattacctcttgaacagcgcaatgaagtaattaaatttatcgagttcttagaatttaaagcaggaaacattgatcttgcttcccaagaaacaaaaactacaaaaaattacccactgagaggaaaacctattaccattgctaatgattttgatgaacctttgccggaactttgggaagcattagcagaatgattttactagatacccatatttggctatggttacttcacgatcctagtcaattatcacaagcagcacaagcagctattgaaagtgaagaatctcaaaatggcttattagtttccgctatttctgtttgggaagtagcagttaaatctagtgtcggtaaattagttttgcctttacccattgatgaatggtatcagttagcgcaaactcattcaggtataatcatagaacctttatcacccatagatgcaattgccagtacacagttaccagacaattttcacaaagatccagcagacagaattttagttgctattgctagacgttatgaaattccccttgttacctgtgatgccaaaattttaaattatccccatgtaaaaacgatttggtaaatatgcgatcgctttttgagatgtgggagggcgatcgctgtttgggatgtggaggaagtacgatcgctgttgggatgtgggagtgcgatcgctgtttggggatgtgaaggggtgatcgctttttggggatgtggagaatcgagaactaatcatctctatttccacgagttaaataacggacttcctccaataaaatattaaatcgctgatcgctttcagcttgtctttgtttgatcaattccatttcacgctgattttgagcagctacttgtagcaatgcttgagccgttactctcaacccatctatgctatctttaacttcagttatactttccctaacttcagttatactttctcgcaactcagtcacaatggaagccaaatcatcaagcatttcatcattccaccgttgtacagtcatagtatgttcttaatattgcaattaaactaatattctaattataccaaagatatcgctttttgagaatgtggagggcgatcgcttttggagatgtggaaagtgcgatcacaaaacttcaaaaagaacgataccattaaattaaaataagtcaaactaattaagtacagccatgaaaacatcagcattccagaaagctattgagtcagtcgaaattttatcaatagaagatcaagaaatattactgaaccttctgcaaaaaagactgcacgaagcaaaaagaaccaaactatctcaagaaattacagaagttcgtcaggaattttatgaaggaaactttcaatttggttcagttaatcaattcttaggagaacttgatcaaccatgaacatcgcttggactcccaaatcattgcgttcttttaaacgtctaatccgaaaatatccaaatcttcgacctctgattgaacaaactttattgcaattagctgaagatcctttttatcctagtttacgtactcacaaactaaaaggtgagttagctaatgtctggtcttgttcaattgactataattatcgtattttgtttgaatttgttgaaaatactgaagaccaacaagaagctattttgttgctcaatttgggaactcatgatgaagtatatcgatacgaaagtgcgatagcgaagcccactgaaggtatcgcttttaggagatgtgagagggcgatcactttttgggatttagaaatgaatcaagtgatctcaggtgattcaggtcaagaaatttcaatcgatctcattagtcaacggattagtaaaatcctaatgaatgtgtgatatggcaaaatcatttactcctgaacttaagaaaatccttgatggagcaggttgctactttgaacgaagtggcaaaggagatcatgaaatttggtacagtccactcacacaaagaacagcagagagaattttagcggctgaaaaaactggtaaaaaaatagcagtagagataaaatcatttttaggagcatcagaagtaactgaatttcacctagcacttggtcaatgtctcaattaccgttcagctttgaaattgactgaacctgagcggatgctgtatttagctattcccgtagatgatcgcttgttgggaatgcgatcactcatctaccatctatgatttgtaggggtttagcaatactaacaccttgcatttttggtaaaaataggtttataattcattatatgtaattatcttcaaaaagaaaataatgctaactacatacactgccaaatatacaaaagttaatagcggctatatgggacaactgattgaatggcaagaagttattactgaaggagaaaccttagaagaatgtagaattatgttacaagatgctctcaaagaaatgatcattgcttatcgtcaacaaaataaagaaattcccacaggaagctctttacttgaacaaattccggtagaagtttgattatgtcagtaaaacgaaaagatttaattaaatatttaaaagaaaacggatattatttattacgggaaggtggaaatcattcgatttatactaatgatctaaaaactattcctgtcaaaagacatcgcacaattgatcgcattacggcaaatgcaatttgcaaacaagcagatttattacctaagttttaaatattaccggatctctcatgggacgctttgctattcagagaatagtaggtatcgcctttagcgatcgctgtttgggggatgtgggggtgcgatcactttgagagggtgtttgaaaagttttggatcgtgattttaggcacttcatgatcccccctaaccccccttaaaaaggggggaactagagtcaaagtcccccttttcaaggggaatttagggggatctagaaatagttgatacaccatcagcgacttttaaaacatcctctgatgctttcagggatggtaaaggaaataaaccgaggtataatagaactaacaagcaaataaagactaggaaaatagatatgattacagtagaatttcaaaccactattgaaaatgggatgatcaaaattcccgaacagtaccaacaacagttaaaacaacccaatatagttaaagtcactcttcaacaagacacttctgaacagtctggaaattaccttcaatatttattagaacatccgttaaatatagaaaaattaactccaatgaaacgagaagaaatttacgaaaacgaataaaaaaatgacatttttagattcaaatatctggatatatgcacttaatcagagtcaagatatccgaaaacatcaaattgctaaccatctagccacacaaacaggactttatttaagtacccaggtaatcaatgaagtttgtgtaaacttaatcaaaaaaggaaatttttctgaaaatcaaattcaaaatcttattcaaggtttttatcaaattcatcatatcattgaacttgatttgaatatattgttaacagcatccacattaagaacaaaatatttattctcattttgggatagtttaattatcgccagcgcactatcagttaatgtgaatcaactctattcagaggatatgcaacacggttttacagtggaaggattacaaattattaatccttttctctaagcgatcgctttttttgggatgtgagagggcgatagcgaagcgctgctgcaagcagttcgctgtttggggatgtgagagagcgatacctacggtaagctaccgctaacaccaatagctcatcaaaacttttgcaattataattgttaacaacccagtaagttatattcgcagctatgaataacgcattacaatatatttgtgattcagaagggcaaacagtttccgtagttgtacccattgccctttggcaagaaataatgactgagagagaaaccgcttatctattaagcagttcagccatgaaagcaagattacttgcagctagaaaacgtcaagaaggaatttctttggaagcagcctgtgaaaaacttggaatttgatatggatgcttttgaggacttagcttggtggatcgaaactgatcgtaaaaaagcattaaaaatcattaaactaattcgtgaagtacaacgtaatccatttgaaggcacaggacaacctgaagccctaaaacacgatctatctggctgctggtcaaggcgaatagatcaagaacatcgtctagtttcaatactgttcggttaacgaaattttctacttaaacaacctattgtataaaaacaacaaattgttgaagatgttgggtttcgttcctcaacccaaccttgtatcttagaggaggttgcatcttgcccgctaaactgatgtggaaatgctttaacctgccatttcctctaatacctgcctcatagtatccgttggtacttcgtctgtcactttaactgcacctatttgggtaggtaacacaaaccgcactttcccagatttgacttttttatctaattgcaaagcatcaataatcgctgcaatatctaaacctgctggtaattttgtcggtaaacctgctttttgaatcagtgcattttgacgttctgtgtcggctttttgccaaagtcccaattttacagcaatttcccctgctgctatcatgccaatacccacagcttcaccatgtttcaacaagcgataattggttaaactttccaccgcatggccgatagtatgaccataattcaaaattgcccgcagtccagattctttttcatcttgactgacaacatctgccttcgcttgacaagaatgagttaatatgtaatttatcaggtcggattttacatagcggagttggtcaaggtgcttactcgcttccaattgagtaaacaattcagcgtcccaaattacgccgtacttgatcacttccgccattcccgccctaaattcggctgctggtaaggttttcaggacttcaggatctattaatactaaactgggttggtgaaatgcaccgatcaagtttttaccttgaggatggttaacgccggttttaccacctacagatgaatctaccattgctaataagctggtaggaacttggacaacattaattcctcttaaccaagtagcagcagcaaacccagtcatatcaccaaccacaccaccacctaaagcgaccatcgttgaggaacgttctaaccgatgttctaaggccacatcatagattttttggatggagtttaaagttttgtagcgttctccaggggggagattgtagtgaaccacatcaaaaccaacattttttaaagaggcgatcgccctttccccataatgtttaaatatcatcgggttagaaaccaacagtacctttttacccagttttaaacccgtcatctgttcacccagttgatctaaactccctggtgcaacactaatttcataagaattttctggtatatcaactttaattacagaactcatttaacaaccctgatatcatcacaatttcgcgtattttatcgcagtttggtaattgataatttttctgtcacctgtcacctgtcacctgtcacctgtcacctgtttccatgattgaatagaaataagtcactaaacaggagtaatacaaatggctatcgttgaatacattgcatttttaggcgtgtttatgggtatcgcagttggtttattatttggtctacgttccgccaagatcatctaattcctaattattcaccctaaaaccctttctagaggcgggttttcccgcccttgataaacaaactcaaaccctaacaggttttctactctgtcacctgtaacctgtaacctttcacctgaccacagcagcaggttttttcccctgcttctcaaacggtggccgcatttccaaacccaataaattcaacatatcccgatctgcatcataatcaggacagggagtagtcaccgtcaacatcttattatcatcactggaaaaaatcgaattagcacccgccataaaacataaagcttgttcaactggggaaagtttcgcccttcccgcacttaaacgcacatcagaagtgggcataataattctagcagtagcaatcatccgcaccacttcccaaataggtacttctggctgatttgccaacggtgtaccctcaacctgtgagagaatattaataggtactgattcgggatggggttgtaaattagaaagggtgtataacattcctacccggtcctcaatgctttcacctaaaccgagaataccaccagaacacacggttacattagtcgtgcggacgttttcaatggtgtttaggcgatcgccataggtccgagtagtaatcacagtgctataatattcctcagacgtatctaaattgtgattataagcatataatcccgcatcttccaacctttgagcttggtttgcagttaacatccccaaagtgcagcaaacctctaaacccatcgaggtgacatcttttaccatatccaggacttgctcaaactgggaattatcccgcacttcacgccaagcagcacccatacacacccgacttacaccggtttcctttgcttttttagcaatatttaacaccgtatccttttctaacagtgcttccggttttacctcggttttatagcgtgacgactgagcgcaataaccacaatcttccgggcaaccaccagttttaatagatatcaacttacaaacctgtatttgtttaggattatgaaattgccgatgtacagtagcagcttgataaacaagctctagaaatggtgtattataaatagccaaaatctcatctttttgccaattgtagcgtattcccaccgtgactatccttttttagaatgttaccaaaataaacaaaattacagcaaaaacagcaaaataataattttagtatatgaaatcagaactgccactaattaaaactaaccgcttatttttaaaagtagctacttccgaagatataccgcaaatcatcaaatattttactataaataaagaccatcttactccattttcacctacttgggctgatggttttttcacagcagaatattggcaatatcaaattgagcaatatcatctagaaattattcacggttgcggtttaagattctttatacatcatcaaaaccaccccaaagaaataatcggcgttctcaacttcagtaattttatacgcggagcagctagtttttgtaatgttggatatagtttagcagaagcagcacaaggtcatggttacatgacagaagcattaaaagcgggaaataaatatatatttaatgaactaaattttcaccggatcatggccaattatatgccccataatcgccgtagtggtaatgtattaaaaagagcaggttttgtaattgaaggatatgctagagactatttattaattaatggtcaatgggaagatcatatacttaccagtttaactaactataaatggaaaccgtattaacaggagtcaggagtcaggagtcgtaggggcgaagcatttggacgacaaattatcaattttatgaaaaggctattttccgaatgcttcgcccgtacaggagtcaggagtcaggagtcaggataaagaattgatgttttaaccctattccctattccctattccctattccctattccctattccctattccctattccctataatgtaagataaagagaacaccaattaaaaactactaaaaatgacacttgctgaaactccaaatcccaccacttcaagtaatcctttactatcacttaaatatgaaagtgccttagaatcattaggtaatgattactatgatgaagtcgcagccgaggaatttcctcaacacattttgcgctggcgtaataatgcaattttaccacgcttaggacttgaagcaacaacagtaaaagacgaagattttattcacgcatttggtaaatttcaaagcagaaaaccatttttagcattgcgttatcacggttatcaatttggtgaatataacccccatttaggcgatggtagagggtttctttacggacaagttaggggaatagatggggaattatatgattttgggacaaaaggttcaggaagaacaccttactcccgtggtggtgatggaatgctcactctgaaaggaggagttagagaagttttagccgcagaagcattacatcgtttaggtgtgaaaacttcccgttgtttaagtatgattgaaaccgggttaagtttatggcgtggtgatgaaccttctcccactcgttcctcagtcatgattagaatgagtaaatctcatattcggtttggaacttttgaaagattgcattatttaaaacgacctgatttaactcaaaaattgttagatcatgtgattgatgaatattacccaaacttgaaaaatgaagatgataaatatgctttattttatgctgaattagtcaaaagagtagccgagttagtagcacaatggatggcagcaggtttttgtcatgcagttttaaatactgataatatgtcaattaccggcgaaagttttgattatggaccttatgcttttattccttcctatgatctatactttactgctgcttattttgattattatcgccgctattgttacggacagcaaccaagtatttgtcatctgaatttagaactattgcaagaaccgttaaaagcaatcattgatcttgctgatttgcatcatggtttaggtaaatttgccgaatactatcatctggaatatcgaaatttaatgttgaaaaagttaggttttgaagatagtaacttagcggaaggtgatgatttattagatttgacagtgagttttttgaaagatagtcaaattaattatcatcaatttttcgcagatatggcgcagactttttctatgaaatggcgtgatgaaccagctttagtaatgaatggttctgatattgtcccatctgtaggttcatcaactatttttgataattggtgtctgctttatcataaaatcctgaataattttgaccctgagcaaatgcagacaatttcccaaactttagctaaatataatccccaagcaaatttattaagaccagtgattgagtctatttggcaaccaattgtagaagaggataattggcaacctttttatgatttagtcaaaggatttcaatagaacgtttgattgagattctgatggttaaacaggtgtaatctcagttaacatttgtcagagtgataactagagattgcaccaaaagagtgatcagtattcacttgaatgactaaatcaactttcgaggatcttaataatggcttgatcaataattctggatgtaatgaacgccaaaagtaattgacaaatgcctcgatttgtgaatcattcatgccagatttaccagcagcgatcattttcctttctgcttgtttacgccattctaaagaacaacgataatcgctgggatcaagtgctatcaagctatctaagcgttgccatagtggtaaataagcttgcagttggtgattcatgtcacgagcaaaagcccgatcatcatctgtgataatggggggtggtgcggtagtaaaagcttggggatcaatgggtagtacacccacaaaccaaccttcaaacaggactatatcaatgttggtgacaatttctggggtagagcgatcgccagcaccagagaaagccgatttatcgaagcggggaactgtcacaggactgttgccttgacgaatttgatcgagtacacttaaacctaagtcgatatcgtgagttcctggtggaccacgccaaatcaaacggggatcttgctgcgttaaagtcaagcgatcgctgtatgttttgtataagtcatccaaagataaacttaaagtagagtatcccaactcctgaagaatcaaactgagaatccgggacattgtggttttaccagtaccttgtccacctaaaatcccctgaatgaaaggtctgcctaacttttgtcgctgggatgcaatttttattcccaacggtagccataaatcccacaatacctgtaacatagcctgaatgggaatttgcaggttattttcacaaaattggctaaaagcagggaaaaccgatttcagtagctgcgatcgctcttgaataacttgagttacattgtggggggtaatattaaaaacatttgccctcacaggatcagccagtgttgctgcttgtgctaacacttgccaatcagcatctatttcacctgtgagcaaaaattcatttagccactcactgagcataactagcacccattaccaacataacttgatcaattgataattgacaattgataattgataattgtgtcattcaacagtgacaaactttcatttccaggtgaaaaaagccaaaaattccgctttgtcaagactatgacttgaacatgagaggtaattgtcaatttttcattgttaattgtccatcattgaaatcttacgaacccagcttaaaggcttctaagaatagactgtagatgaaaccaactttcagaaagttcagagtttccacccacagagcttgtctagccaaaaagcggcgactgtaaaaaatcctgctggtgatctccgttagtagaaccaaaaaagcagcggacaccatatccaactcggccttttgtccagcggtagtagatactgccgatcccataaaaaaaccaaataaccaactgattaaaagtagggataagcgccgccaaggattaacaaaccattgctccacactcctagcaatggtactgaataggttgttaagacgagtattttgcatattggggactggggactggggaatgg

SEQ ID NO: 41 - DNA, 47209 bp, Sphaerospermopsis sp. LEGE 00249
  LEGE00249_56
cgatttttgataattctttaattttcaattatcaattgtcaattatcaattcccaacgggttttcctggtgtctatggcgcggtggaaccacactgatcccttcccgaactcagaggtgaaacgctgctgcggcgacgatagttgaggggttgccctctgtcacaatagctcgatgccaggtttaatattatatcataaaacctctcttttgataaactaaagaggggtttttgatattttgtacttgaccttcagaaagaagtaaactagacaagggatcattagtttaaaaatggtgcaattagtggcaatagttattagatactgccactagaaatgattattaatagtatgaaattcgttattgcatttgcttgtccaggaagtttcaagaactaggaaattaaggatcttctggaaatacccattttggaggttctatcatttttttccgcagtcgttcttcagctatctccagcattttatccaacgaagtctcttcaataaacttggaagttgcttctctaaactcaatattgggacatttatcgcctaaaacgcaaccgttaacgcaagcttcagcgcagttaattgtctgctccacagtaaattcctctctcaagtacggcgttattaacctttagataaatattactattaagtttgtatggttatcagaagttattcttggtgctacctattacctgttatctaaacttctatgtcagaattattaactcatactggaacgatcgctgctattgctactgctgttgtcccccaacaaggtagtgtaggtattgtgcgggtttctggggatcaagcattggcgatcgccaaaactctatttttagcaccgggaaaacaagcgtgggaaagtcaccgcatcctttatggttttatccgtcaaccccaaaccaagcaagttattgatgaagccttattattaataatgcaagcaccccgttctttcacccgtgaagatgtggtagagtttcattgtcacgggggaattatggcagtgcaacaagtattgcaattatgtttagaaaatggtgcaaggttagcgcaaccgggggaatttacgttaagggcttttttaaatggtagattagatttaacccaagctgaaagtattgcagatttagttggtgcaaaatctccccaagctgcacaaacagcattagcaggtttacggggtaaattagcgcaaccgattagaaatttacgctctcaatgtttagatattttagcagaaattgaagcgagaattgattttgaagaagatttaccgcctttagatgaacaaagaattattcatgaaattgatagaattagtttagaaataaataaattattagccacaaaagatcaaggtgaattgttaagaactggcttaaaagttgccattgttggccgtccgaatgtgggaaaatcaagtttattaaatgcttggagtcagagcgatcgcgctatcgtgacggacttacctggtacaacccgtgatgtggtagaatctcagctagttgtagggggaatacctgtacaggttttggatactgcgggtattagggaaactttagatcaggttgagaaaataggggtagagcgatcgcgtcaagctgcgaataatgcagatttagtgttatttactattgatggttctgtgggttggaccgatgcagatcaagaaatttatgaacaggtaaaacatcgtcctttgattttagtaattaataaaattgacctcatttctgaagcagaaaaacaaactctgaaatctaaaattcaaaatgtaaaagctaaaattgaaactgctgctgcgaaaaatcagggtattgatgatttggaaatggcgattttagatgtggtaaaaatgggtaatgtggaagctgctgatctggatttagctattaatcaaagacaagcagcagcattaacaaaagcaaagattgatttagcacaggtgcaagaaactattaaaaatcaattacctttagatttttggactattgatttacgaggtgctatttatgcgttgggagaaataactggggaggaggtgacggaatcagttttagatcggatttttagtaggttttgtattggtaaatgaattttaaattttgcctttaaattttgacatttgtcagaatcaggatgtccaagatttgaggatttacaggatgtttttttaacgaaccacagaaacacagaggacacagagaaatattttcagttattaaaatgatgtactgatcttgtaatttttcagaatcaggatgtttttgttttctttatacttactatgataaatttaattttttgcgttcagataatctttcttcgctattcatttgtaacaatttaactgttgttcttccttcacaagtcaaaccaactaaaaccacttctgaaaacatgaaatgtaatttccattcctgctgacgcgggttaaataaaaagctaaaattacctgtatctgggtcaaatgaacctaaatcactacccttatatcggttacaacgccaacaagtgagtgctaaattgtcagcattggtttcaccaccatgcttttctgcaataatatgatcaatttcgtggggaaaaaatgcaacttttgcaggtagtaaacaatactcacattgataatttgcacgttcttctactaagcggcgaagtgcagccgagatatatgatttactcatttttactctttaaataagataaattaccagatttaatcatcaccattaagtgttcaatgcgttcatattcatctaattcttgcacttcactaggtgtaatttcacctgatttactgcgtgttagtaaagtacgtaacctttcttgcatttgcggtgtgggtttaaattcagcaatttcttgtggagtagggttactggcaataaaattaaggatatattggtaaacttgtgttggtattaatggtttttgcagacttacagctaggagttctggtaaggtatctattcctatttgtgctatttgttgagatagttcttctgatatttctaggataattttaggcatagtgtatttttccaaagtttgttattttattattgtgagaattaggatttactactaatattttaatttgtctgaatcaggatgtccaggatttgaggattttcaggatgttttttgatgattgtttgtgaggatgttggggatttttgaggaggttttcaaatgattgattttgcataatttaaacaatctataaattactatcctgctcatcctttaatcctggttatcctgattcagacaaacaatatattaaacttctattcatttaaccaactaaaaagttgacctacagtgagattaaatgactcagcaaaagctggaacaggtaaagtatctgtttctaattcaaataatagaatacgttgatcagcaaaatagacaaaaactaatttttcttcagggtcaattaaccaacccatttgagtaccatattgaagacaatgaagaatatttctaactactttagtttgactttgttcaggagaaagtatttcaattgtccagtcaggagggatagtaaaagtattagcaacttcaccattttcatcgcggggaatgcgttcccaagtgaagacggcaatatctggtacaatggatctaccgccaaaggtacagcgtaattcagagtatgcgcgggcgatatgctggggttttagtgctaggttaatattagaaccgaggtcaagctgaactgtgctatgttttccttggggcatgggtttttgaatgatttcaccgttaataaattcgcttgctggtttggtttctggtaatttgagaaattcctcaagggttaggggtttaataggggtttgaaccattatcatttcgggtgatgtggattattaatattgtatcttattttaattatttgtcagaatgaatgattattctcttgtatgaatttcatctcttgttagtttagataatcctttaacgctaataggattttttgctaattcatccattaagctatattctcgttgaggttcattttggaaactaattacaactctaatttcacttccgtcaaccaaattagtttgatattcttgaggaatttcaatgataccttgtttaacttttgcattgaatctaactgaattaatcatttatttatctccatttgataaattatgataataatataatatcacaatctgtatagattctcaaatcttaattaaattttgcgtttatctgatagtgtagccatatcaggaaactcttcggtaagtcaaaaatcaaaagtcaaatctacctaagaattactaacagaatactcaactgaacagggattatcaataagtttagaagcgtctattatttcaattactacaatatttccagcgtcgtcataatctaaaatgattcctggtttttcttcatcactttcttcaattggcacattgctgaatataattcttaaaacatcaacttctgcatcgtaggtgattttcatgattctctccagtatttctcaattttgctagttcgataaacagtaattacaactttaggatcaatatcatctgcaacaataacacgcagtaagaagattttaccgttaccaaagtcaacttttgattgatatactttccgtccttctctttctagtataatttgttggggattgtctaacacagattcaactaaagaaagagaaatttgtcgtctttccatctctatttgtgcatgacgggaaatcttttatgtcatttcatttgatattgacttaataattttttgtaatttttaaatattacaatcttcaagtcttgacgcgagagaagagacacgatacacaccttcgtaattactaaataccaatttccctccacccaaagggaggttaccttctagtgcttttatatcaaaagtaatatctctgtaagacaaccaccttcctccttttctccatcctaccttgtccccgaacttcttccagatttcctcgttatattccctcgttcctcccaaactctgataaatttgtttctgcacagaaaacccaaacttaccataactgtattttacccacaactggtcaatagtgcggaggtctgcacagggaaaattatcaatattttcttctcttaaccaaccttccttttcccgtttagcaactgctaacattactcttgctgttttctcatctgcttctttccacttcccggctttgagtaagtcacgcagtttaatataatccattccaaaggatgattgtaattgtacctcttggtttacaggttgtggcgtagatataatttgcggttgtttttcctgtactggaaacagtttacaaatctccaggcgagagaagagttgacacttcaatgtacccccacctacctccccaccccgataaccaacccccacaaaattcaacaccacccattccgtattactttctaaacaaactaaagggaagcgtcctaaaggtgcttttatatcaaaagtaatatctttgtaatacaaccatttgtctccttttctccattctaccttgtccccaaaggcttgccaaattttctcgttgtattcgcttgtgccacccaaactttgataaatttgcttttggacggaaaacccaaaacgtccgttgctatattttacccacaattggtcaatagtgagcaggtctgcacagggaaaattatcaatactttcaggatctaaccaaccttctttttcccgtttcgcaactgctaacattagccttgcggtttcctgatccgcttctttccattttccttttacgagtaagtaacgcagtttcctgtagttcattcctacggatgatattaactcaatatcatctaattctatgaagttattatttttaatattagatttttgattaggatcacaattttcaacaagagagaatatatcccaccctacattgataaattcaaaactactcataactttaaatatcaaaatccagatacaagctggaaattgaccttctggtgcttggatatcaaaaataatttctctgtaatacaaccaattatcttttattctccatcctactatttcaccaaatacttcccaagttttttgatcataatatttcgagccacctaaatcttgataaatctgtttttgtacagaaaacccaaagttacccttgctatattttacccataattggtcaatggtgcgaatttcatcataaggaaaattctcaatatcttctattcttaaccaaccctcttcttcacgttttacaactgctaatattaaccttgctgtttccttatccgcttctttccagtttcctgcttcgagtaagttagtcagtattctgtagtccattcctacaggtgattttaattgtactcctgggtttgcaggttgaggtgtggggatattttgcggttgtctttcctgtactggaaaaaggttacaagtctcgatgcgagagaagagataccccaataccttacactcacaataaataagccacttactttcacatctatgccataaaccatgaacgtttgggaggtggccttctggtgcttttatattaaaagtaatatcactgtagtacaaccactcccatccccccatccatcctatcttgtccccgaacttatcccatatttctctattatattctctcgttccacctaaaccttgataaatccgtttctgaaccgaaaacccaaatttactattactgtattttacccacaattggtcaattattcgcaggtcagcacagggaaaattatcaatgtgttcatcatctaaccaaccttctttttctcgtttcgcaaccactaacattacccatgctgtttcctcatcagcttctttccatttcccagctttgagtaaatcacgcagtttactataatccatccctacggctgattttaattctacctcattaccattattcccactacttaaaccaggaaataaaccaacccattccttcatactttgcggacggtttttaggttctaattctaaacctttgataatcgcttgatttaacttatcactaattctagaatttaattcctgcggttctattaaagtccgattatttagcttcctcgctaaagatgcaataggggtatcgccagtcaccaaataaaacaaagaagcagctaaagtataaacatctatacttgctgatttttccgtttctaatatttgttcccaaggtgcaaaagctaaattagcagcttggttaatactttgactattcacatttcctgctaaaccaaaatctattaacactacagtattgctattttctcttaaaatcatattcccaggatgtgcgtcccggtgaataatgccattttgatgacaaatagataaagcatcagcaatttgtttaatataatcaatagcaattgattctgataaaacacccttatcttgtactaaatgatataaattttcacccttaacaaaatccatgactaaacatggtaaattatcctcctcaaaaaagtctataattctgacaatatgaggatgatgaaattgcgtaatatctgctaatcttcttccttccttgcgaaaaccttccacaaatttaggataattagcatctctatacaaccgactattaggagttttaataactacaggaaaattcaaatcttgatgtttagctttataagtaacaccaaaacctccaacaccaatttctgtttctatcacatattggggacgtttttttaatgcttttccgggttgtagcataaatcaggataatgattgatgatgtccgtgattataacatactgcgtgagtattaacacgatcagcaatcaataacatcctgtacatcctcaaatcctggacatcctgattcagacaaaaaaatttttgacttttgacttttgacttttgacttcccgaaaggtgtcctgattctgacaattaaaaaattcaagtcccctcgcaaaattcggtcatctaaatagtttattattttaaaagatcaacatattaaaaaccgaccaagttaaactcatgaaaaaatcactgcaactaccccaaaaattaatgttactcggttcaggagaactaggaaaagaatttgtcattgctgcacaacgcttaggtaattatgtgattgcagttgatcgttatgcaaacgctcccgcaatgcaggttgctgactgttcagaagtaatttctatgctcagtgcagatgatttagaagcggtagttagtaaacacaaacctgattttattatcccagaaatcgaagccatcagaactgaaaaattacaagaatttgaacaaagaggaatcacagttattcctaccgcagcagcaactaattacacgatgaatcgtgatagaattagggaattagcacataaggaattaggaatcagaaccgctaaatatggttatgcagtcagcttagaagaattgattgctatttctgaagaaatcggatttcctaatgttgtaaaacctgtaatgtcatcatcaggaaaaggtcaatctgtagttaatgatagaacagaagtagaaacagcgtggaaatatgcaattgaaaattctaggggtgacagtcaaaaagtcatagttgaagaatttatcaattttgaaatagaaattaccttacttaccattaaacaatgggatgcagaaactatattctgtcctcccattggacacagacaagaaagaggagattatcaagaatcttggcaacctgccggtatttctgatgataaaatattagctgctcaagcaatagctaaaaaagtaactgatgctttaggaggtgcgggaatttttggtgttgaatttttcatcactcaagatgaagtgattttctctgaactttcacctcgtccccatgataccggaatggtaacgttaatttcccaaaatttgaatgaatttgaattacatctgcgggcaattttaggtttacctattccccatattgaacaactaggatattctgcaagtgcggtaattttagcctctgaaaaatctgattccattgcttttactggtgttgtagaagcattagcagaaaaggatgtagatattaaattatttggaaaaccaaccgcacatccttacagaagaatgggagtagcattagcacaaggaaatgatgaaaaatcagcgagggaaaaagcgacaaaagcagcaaataaagtcaaattagtttaaatgtaaaactccattagggtgcgttacgctgtgcctaacacaccctacaatatataatacttactttcctagaaatgctataataaaacaggaactccaataattgtataggataaatttatgacttcaccatttccagggatgaatccctatttagaaaatcctgatttatggtcagaagtacatcatagattaattacagccatagctgataatatagaatcccatcttagccaaaaatatcgcgtagctatagaaaaacgcacctatagaactgacagtgaagattctctgttagttggtattcccaatgtaacgattttatcagtaaaacaaaaaactcaaaaatcagatatttatacagcaacagcaactttatccacagaaacagcaaataaatccgttgatgtcaccttacctttacctttagaaatcaaagaaggatatttagaaattagagaagtttctacaggtaaagtagtaactataattgaagtgctttctcctactaataaaagaacaaaagaaggtagaaaatcctatttagaaaaacgggataaaatactacaaagtgatactaatttagtagaaatagacttaattagggctggggaaaaaatgcctatgattacccatattgctgatacagattatcgaattttaattgttaggtcttatcgcttaccatcggctcaactatttgcatttagtgtcagagaaactatccctaattttaccattcctctacaaaaaggagaacaggaaatagaagtcaacttgcaggatttgttattagaaatatatgaacaagcgggatttgatttaaccttagattataatattcctcctgtaccagatttatctgtggaagctcaagaatggatggatcaattattaagagaacaaggaagaagaggtgacagctaaagtagatagataagggtgtgttagcgatcgcctaactcaccacactaattatctaaattcccaaatctaccgcaatacgatgagcgcaagcaaacccagaaaacgctacagcatttaaaccctgacccggaaacgtgctatcacccacacaataaagattaggtatagcagtacggttaaaaggcatacccaacaaaccccataacttacgtctgggtattggtccataggtcccgtctaccctacctaaaaaccgccgatgggttaggggtgttcccacttgcatatagtccaaacccgcatctaaaccgggaaaaattcgttctaatctgttaataattttccctgctgcttgttccttcttttctgcatattcactcctagaaagtccccgccaattatcaatccaatccggtgtaaaagcatgaataatgtggtattctggaggagctaaactcggatctagcaatgtaggaatagatacaaacagcgtccctgctgctgattccattttttcccagtcttctaaaataatgtgatgacattctgttcctgtaggtaatacggaagcttttacacctaaatgcaaacttaaaaaacttggtgatttctgatatctctgctgccaatttttctcatcaggtggtatttgtgcttttggtagtaatttttcaaaagtgtcccagcgagtagcattagatacaatttttttaccatgataaacttcacctgttgctaattgtacaccaatagcttgaccctgtttagtgagaatttttgttactcttgcttgatattcaattttaccaccacatttttctaaaccttctgctaatttttgggcaatttttcctactccacctttaggataattaactcccccatagtgacgatcagaaaacaccattccggcattaatcattggtgtcatattagcaggaacgacagaccaacaataacattcaatatctatgaattttaataataacggatctttaatatatttgcgggctatatcgccaacattttgcggtaagtattgggctaaacctaagcaagctaaggggttttgccagaatactcgcattacataaccaatttcttctaatgataataattctatgctattgaggcaattaaaaattttttgacattcgttataaaatcggcgaatccctttttcttcatggggaaaataagcaattaaattttgtaaaaatttctcgtaattttgatcaactttaatatctaaattatcaggtaaatgataatgaatttggacaggatcagggatggtttctatgtcaacattgactgcatctaaagcgcgggtgagtaggttggttgttccttttttaccaaaaccaaatatcatggatgcaccaacatcaaaagtatatccttggtgctgaaaataacctgcactaccaccaggaattaaataacgttctaaaaccaagactttcgcccctttagctgctaactgggtggcggtaactaaacccccgataccagcaccaataataatagcatcaaacataattggtaattggtaattggtaattggtaaatactagagtttgcgtatttgttctcattttttatattttagccttgaaagctgaaaaaaaagagggacaagccgctattactggccaatcccgtctgccgatcctttaaagagaggagaacactataaacaatatagccttgattgagaatatctgtcaactactaatgaaaatttattgcaatagttggaaagcgatcgcacaaatgccggaaatacacagattctccacagccataaatgagcctatctaaccaatgcacaggcgggaaagagtatgatggtggatcagttccttgatagtgagaggctgctttttgaactatgactcaacaattgctagtttatgtcccaccccatcccctgatcaaacactggctggcggtagctcgtgatgcagctacaccttcagtattatttcgctctgcgattacggagttgggacgatggctaagttatgaagccgcaagagagtggttaccaacgcaaaacacggtagttaatactcccttagctccttgtgcagcaactttcattgatccacaagtaccagtggcagttgtaccgattctccgggctgggttaggcttattagagggagcgcaaacagtattacctttagcaaaagtttaccatttgggtttagtgcgaaatgaagaaaccttagaaccctcttgttatttgaacaaactaccagagaaatttgatccagaaacgagggtgttaattaccgatcccatgttagcaacaggaggatctataatgacagcaatggcagaattgacacaaaggggtgttgatccggcgttaacgcgaattgtttgcgtggtagctgcaccaccagctttgcaaaaattgagtgctgcttatcctggcttaacagtttatagtgccattattgatgaaacggttaacgatcagggatttattgtaccgggattaggagatgcaggcgatcgcatctttgggacttgacgaagatgggtattaatcacccactgcaaaaactttgcacctgaaaaagcggggttttagacccgaatgtttggataactaataaaattactgaaaattggcttctgatggtttctttgttcaaggcggtgaaaatatgagtcaaaaagatggttttgccagtggttttttacttgggactattgttggcggtgtagttggcggcgttttaggtgctgtgctggcatctcgacgggatacagtggaagaggaagagatagaaattaacaatggttctgtgacagcgggtaaagttccagctagaagaagacggcagatgagatccgctgctggtaaagatttagaaatggaaacagcaaggcgatcgctagaagataaaatcgctcaactcaatgccacaattgatgatgtgcgaaatcagttgagcaatgttaatggcagttcatctggatcagcggaacgctctatttcccaagactcttaaacagcagttacatcatagcgaaaaacctattttggtagatgtcgctgctatttgcagacgctatgacattagctaaattaaaatcaagacataagacagcgtttaacgtttaccacaaacatcacctatctacatctatgtatttactgattaacactctcaatactttcatcactatctatagctctttgctaatcattcgggttttattaacctggttcccccaagtcaactggtataaccaaccatttgcagccttgagccagattagtgacccctatcttaatctatttcgttctattatccccccattgggtggtatggatttttcgcctatcctagctttccttgcactcaatgttgctggaagtgtaatatctggtcttgttcctttagtccagggattttaaatcatttctgctcatttcggtaattacccggtctgatatcagccgggaatgtattgtaaaaatataggatttgctgaaaaagtcttttcgtggaggcagggaatagggaggaaaattttagattttagattttagattttagattggagttaacaaaaacaatccaaaatccaaaatccaaaatccaaaatcaataactcctgcctcctgcctcctatcttcgcactttaccgctaaacccagatgctttaaattgcttgagtttcaaaggagttggttggtttgcaggtacagaaattcttaactcaaaattactaacaccaggtggtacttcaggaatagaacctagacgggtgcggttttgtaatattggattattattggcatcatagatgcgtccgtagatatctgcgtcatagactgttttataagtgctgttttctgctttaccagtgacaataaagcaattagcagaccctgaaccattactaacaacagcaccttgagctaattctggtggacaatcttggtatgataggtcagatagtttaatttgtgttaaagcttgggctggtaaggtaaaaacccaagagcagaaaactaataaacaagagattaatattagcttgagtgataggttgagtgagtgcgatcgcataaaacacaaagtaaatttacaaaaagtatacaaaagttttatttgccgattaccgaaaattccctgttttttaatgagaaagtggaatttaattttgcaataattgtatcaatagaccattctttgcaccagcttatgaatccagatgagattgaagcagtcttgcaaacagcatttagtcgttgtgatgctgctgactgtcctctcactgatatacagaaacaaatattgctgcaagtagtcgaacagattcagagaagcttaacttctagggtatcagatactaacaaccctttggatgaactgaatccagaggaattagaggtgtttttggagtttgtcaaagcagaggaagcacaaaaccgcacttggaaagtacaattacttaatgattggcttttagcacaagattcgggaaaagtgcaatttattcgccaacgttatggtttacagtggttaaatcgggtgcaagcatatcattttgataagtatgcttatttggaagaagctttaaaactgaaagtaggcgatcgcattgaagtttctaatacactgtgggaatggataccagaagatgatatatctcagaaggaatggattccctgtatggtaattaatattgatgaagttgttaatagtaatgacagttttagtatttgtcaaattcgcttttttaatggtagtgaatatgaaattcctggtgtttatgaatggaatcggtataattggcgttggccgaagaagtaaatatcatttaatatcatttacccagataccggacttctttaagaagtccggtatctatcaattttaatttgattttgacttatttattaaagtaatcaaccaggaaaatattaaaattttatacgattttatagcattgaattagacatattgtaaaatatgatcttgaaatagctaaaacatttaaattttgagattattaattatggtcaatcagttattttatggtgataatttgcaggttttgagaaaacacatcaaagatgaaactgcggatatttgctatattgatccgccgtttaattccaaacgcaattatcaccaaatttataataatgttggtaaagaagataaagcacaaactcaagcttttattgatacatggacatgggatgatcacgctaatcaaggtttagcagaaattcaagaaaactatttaggacattttacttctcaaagcatagatttaatttctgggttaaccaaagttctgggtaaaggaagtctattagcttatttagtgaacatgactttaagaatagcagaaatccaccgagttttgaaacccacaggtagtttttacttgcattgtgatcccacagcttcccattatttaaaaattattatagatgctattttttgttctcaaggtggagatttcaaaaatgaaattatctggaaacgtacatcaggacatagtgattctggtaaatatggtaatgttcatgatgtgattttttactattccaaaagtttgaaaactacctggaatcaggtatatcaaaaatatgaacaaagttatattgataaatattacagatatcaagatgatgatgggagaaaatggatgtcaggtgatttgggtgctgctggtttagctggaggcggttatcaatatgaatggaatggagtgacaaaactgtggagatgtccaaaagaaacaatggaaaaacttgataaacaagggagaatttactatactaaaaatcgtgttgcgagaattaaaagatatttagatgaaagtgaaggtttaccaatccaagatacttggaatgatgtagaagctttgcgatcttggcacaaagaattattaggatatcccacccaaaaacccgaagcattattagaaagaataattcaagccagtagtaacgaaggtgatataatattagatgcttattgtggttgtggaacaacagtagcagtatcacaaagattaaatcgacaatggataggaattgatattacttatcaaagtattagtttaattctgaaaagattagaagactcttttggcaaacaagtattagaaaatattaatattagcggtattcccaaagatatgcaatctgcggaagcattagcatttaaaaaagacgatcgcactcgtaaagaatttgagaaatgggcaattttaacctatactaataatcgtgctaccattaatcaaaagaaaggagcagataaaggaattgatggaatagcgtattttacaggagacaaaaacgaaccagaaaagataattttacaagtaaaatctggtaatgtcaaatctggagatattagagatttacagggaacaataaccctagaaagtgcagtattagggatttttattaccttaaaaccaccgacaaaagacatgatcaaaactgcaaaagaagcaggaatttatcaaagtcggtatatgagtcaacctgtagataaaattcagattatcacagtacaagaaatcattgaacaacaaaaaagattagatatgagattaagtttagaagttttgaaatctgcggaaaaacaaaaggaaattaaacaaacacaattagaactttttcgggatgaataactctcaatcctaattattccccagcagcttgtataattgttgaatacaattccttactgactcgaaagtcagctttttcaatcattttatctaacaaaatttttacagaagggatcaaaatttgtcgtttcgcttgcaataggactcctaataaccaggtattaagatactcataatcaaaaatgtgatatttacttttaattatagcaaaacttaatatcatcttaccaattgcattgcatcattaaaaaattgccgacataaacctttagtgacaaaaatagtcgtcaacaaattaaccacagctaccataaaaataattaaaatttcataagaaaccgctgccaatgcagatactccagctaataattgtccactggtaaaagtgggtattgtcaccatgccaattagcatcatttgatttaaagtaggaacaaatgcagctttaattgcatcctggcgatagtgactaacagcttgctggggtgttgcacctaaactgaggtgtgtttctatttctgtaggaaattgattaatactgctaactagcctttctccggctactgctgcggcattcatagcgttaccgatcaatataccacccaaaggaattaaataacggggttcataccatctgtcaggttggataatcaaaaaattggtataaagtaaggttaatgacgtactagcaaaaatcactacccaaactaaaggcagtaccaaaggaattttttgactgatgcggtttcgtgcgacaatcgccgtaattgtgagaatgatagtaaaaattcccacaacagaccaaacattatcgacagcaaaaatgaagtctaaaacgtatcctaatactataagttggaggatggttctaccggtggctaatgctaggtttaactctagtcctaatttttcccagacagataaaccaatagcgatcgccattaaacccacagctaacactaaatctacaatatccagtttaatcaaatccggcatggtttctttatttcctgagatagtttacaggcagaaggcagaagtacaacctattttagtcctagttttatgatcaattaatgtcataactaccctgtatactgctatatcaccgttaaaagtgtatcttttgaatctcccgataaaataacaactatgatccaaagtgtaaattccgttcctgcatttgatatcaaacagcaatatgccaccattgaagccgaagtcagtcatgctgttttagaagttctcagttctggccgttatattggtggtcctgcggtagaaggttttgaagaacagtttgcagcttatcatagtgtcacggaatgtgtagcttgtaattccggtactgacgctttatatctggctttacgtgctttagaaattggtgcaggtgatgaagttattaccacaccctttagcttttttgctaccaccgaagtcataactgctgtcggtgcaacacctgtatttgtagatattgatgctactacctttaatttagatgtcacccaaatagccgcagcaattacacccaaaactaaagctattatccccgttcacctgtttggtttaccagtggatatgacagctttaatggcgatcgccaactctcataatttagcagtaattgaagattgcgctcaagccaccggtgcaagttgggaaaatcaaaaagttggtagtattggtcatattggatgtttcagcttttaccccaccaaaaaccttggtggttgcggtgatgggggtgcaattacaactaacgatagtgcgatcgctgctaaactgcgaatattacgagaacatggcagcaaagttagatacattcacgaagaaatcggagttaacagtcgcttagatgccattcaagcagtcatcctgcaaatcaaacttcgttatttaaacacctggaacaaacacaggcaaaaaatagcaacatattattatcaatacctcagtcaaattcctggcattactcccccccaagaattattaggaggagaagccgtttggaatcaatataccatccgcgtttccagtgaagaaagaaatggtgcaagttccaaatatcgggactgggtgcggactcaactgcaagaaaaagaagtaagcacaatgctctattatccccgtcctttacacttgcagccagtttatgaaagtttaggttatcaaccaggacaattacctgtgtccgaaaaaacctgtcatgaagtgatttctttacccatgttcccagaactcacacaggaacagcaagataaagtcatttatgcgttgaaagactgtttaagttagaagaggtgacaggtgacaggtgacaggtgacagttaagagggaggggtgagaaacttctccccaacttcgatagataaaatcttaatttctctctgcgcctctgcgtctctgcgtgaaataaaaaaatgcgccttaacaataaaaaaagcgaatcaacatattttaccgcaactcagaaactcatatttttataaccctaacttatcttaaagtagtagctgtttacatattcaaatcttacaaccattttcccttaacatttattcaaattttattgagaattatttttatttcccaacggtattgcaatagtttccggcatttgctataatttctctaaatttcatcatcagggtaagtatgtcaaattttaaaaaaatcaaaaattgccatcttttaacccgtgatatacaaaggtttgcaaaatctatacttaaatcaccctaaaaaacactgagaaaaaatagatgttgcttgcaccaattttaggggtaaattgatctgaaaacttgaatagtacaaataaactcttgacaaaaaatcatttataacgatctgcgttcagatgcgttttttgtatttaaggtttgaaaaagtcttgttatgagtttttacgagtgcagagtgtctaattttagattttagattttagattggagttgacaaaagtaaataatccaaaatccaaaatccaaaatccaaaatccaaaataaataactcctgccttttatgcaaaagtgcgagtatttgcagtcgccaaagcttcaaccaaaccacgcacagcagcgatcatcgcaatttcgctgttaagttggttaatagcagaacccacacccacaccagcagcaccagcagctacagccaaaggtgcagtcacattagaaataccagaagcacacaaaacaggtacagaaaccgcacgagaaatttcataagctgcggctaaagtgggagcagctttttcaatcaaacccaaagtaccagggtgtgtaggttgactgctagtaccgccttcagtttggataatatcagcaccagctttgactaaatcttcagctaattgaacttgctgatccaaagttaggatgtggggaacagtcacagataaagtaatttctggtaacaaagcgcgggtttgctgagttaacgccaaaacttcatccgcttcaaatctgcgaccttgagcgtaaaaagaatcaaaattaccgatttcaattaaatcagcaccagcagcaacagctgctacaaatttttctggtgcaactgcggaaccacaaacaggtaatttagtcaagcttttagctaaatgtaccaaagccgcatcagcagcgatatcaacaaaagtcgcaccacccaaatcagcagctttcacggtagcagcaacactttcagcgttaaaattatttaaaccgctaattacttttaaaacactgcggttagcaaatgcacgttgcaaattaggaagcatagtcataatatctgattttgaatctattgaggtaagaattatacactatttgggggatttgggaatagggctttgggaataaggaacaggaaataggtaaaattaccagatatttctcagaatttaatctacatatttaatattcaaactttcaacaaatttactttcttgagattttaaatactcatctctttgagaaacaaaattatctatttttccctggttatataaagtaaccatttcttctgttataaaatgcttttctaaaacatcaggttgagaattgttaataaagtttgaattttctgtaatgcagcgcgaagaggttgtacttgtttttctaattcttgctgttggattttacattctccagaggcgatcgcatattcgctatactgactaccaataaaattcaaaaaatccaaagtttcacttaagatgatgaatttgcttagtcaactgtgctaccttttatcctacaggttcagtagtataaatgcgatcgctgctgactcccagcaaccgcacccctaccgtaccagcaccatttacccgcacagactccgtttccaaagtcacaggcaaaggtgtaattaataactctcgttcttctcctgttaaggatattacacctcttcttgtaaccaaagctttgtcaccatagactgtgacagatacaatctagctttgtattgttttacgccaagatgataattccgagtttaccattgccagttttccaccatgtttaacagttaccagttattactgtcaccttttgcctgttcactggtttaataattatgttggttaattgtcaatggtttcctgttgcaccgtcaagcagtaaggaagttttgaatgtaaatttgatgcaaattttatgacggaagttgctcaaccttaatactgagaggagcaatttcctgttccacaattttccttgctgcttctaatagatactcgtaataagtacgagcaacaatagataattgtttacctgctggataagctatataccaagtccgcttaatgggaaaatgctggacatccaaaatactaaactcatgggcatccgtcaacaaagtgtgacgagataacaccgaaattcccaaacctccaactatagcctgttttatagcttcattactccctaattccaattttaccttgaccttcaccccatgttcatctaagagactttgcacagcgcggcgtgtacccgaaccaggttcgcgcataataaacggttcttctcccagtcgttctaaaggaatatttttttcctttgctaacggatgcccagcgggagcaaaaaccactaaaggattttccaaaaaaggttgacaattgatatccaaatgatctggaacttgactcataatatacaagtcgtccaaattagtaatcatccgatctaaaataccttcatgatttgtcacctgtagcgaaatatcaattcccggataaagttggcaaaacggacccaacaaacggggaataatatatttagccgtggtaattacccccaaacgcaattgaccttgttttagcccctttaaattcgcaacagtcatttcaaactgggcgatagtgtcaaaaatctggcgacaagtggcaaataactcatgtcccgcttctgttaaaaataagcgttttcccacctgttcaaacaatggcaaccccacagattttgttagttgcttgatttgcattgatacagtcggttgggtgagaaataactcttcagcagcacgggtaaagctaccgtgtcttgcagcggcctcgaacaccttcaactggtgcagtgtcgcttggttcaaggtgattctcctctaatagcagttaatagataacttaatttgctagttgtgttagaagttcagaagttcagaagttcagaaccaagaattcagtttttctcctacacccctacaccctgacttttttgtaactagcaatttgggttagatatactagtcagcagtaagattgtgaaaactcttgttttacaaagattgtagaatttgagatgatcctcattatctgccgactactatatatattcagtattacttaacactgacaaattgtgtagtggcacacatattaaagttatgagtgtaagtataggtaaaaatctatcctgtctatcagaagtgtagtattggacttatggaattgaaaagatatgatcaaaacaacacaaaacgtaagattccttctaacccaagatgaatgctgaatatcgaaaaatatagcagaaggcaagaggcaaaaggcaaacgtaaaacccttgtcaaaactaggtttgacttttcaatcatgtcttaaagttcttgtccacagctacatataattgattattcaccattcatcattcatcactccaaagttcttccttaaccttaacaggcaatttcgctaaatcaggtaattcaacagcttctgcatcaacaattttatccttgatattcaagggtatattcactggttgacgttcttccacccagcaactagccacaggcaaggtttgttccaactcatccaaaggtcgcggaatcaccatgacagcgtttaactcaccaatcctttctgcctcatacattcccgcttctacagcaacagccacattagccaccgtaccccgaataatggcagtacataaacccgcaccaattttttcataggaagctaaatggacatctgctgatttcagcatagcatcacaagcccctaccattgccggaaaaccacgagtttccaccaaaccaatcgcttgattactcaaacggctgtaactgccatcctccattatttgcgtgagacggttaataggtagaactatatccaaattgggataaggtcgaggaataaccaaactagacaccaattgtccaaactgttctgctgtttgtacaccagcttctacagctagacgcacatcagcaatattaccccgaacaatagccgtacagtgaccactaccaattttttcatatccgactaaatgaacaccagccgacttgagcatcatatcagccgtgccaacaatagccggaaaactgagagtggataccatacccaaggctgcatccttgaggggatcgcggcgacgtggtgcatggatggtactaagagagcgttggttgtatgtttccatcataaattcaccaggattctcgcaaaggcagacaactaacaaataacacttactctgaagaattttcagagttttggttactcaagggttgccgattgggaaacaatgtagtcaatagtctattaatgcttccttgtccatatatctgtgttccaaaaatttgagaactttcagtgttagcaggactgggttcgggtgcttgagagttagtttcttgtgaacctggaagagtagtttctgtgggggtagagtcagtaaccaggggggttgctgcaactggaggcgactggcttttaggagtgggagaaggtggaggtacagaaatagattcttgtttaaaatctacaaaagccacagcagagaattgagtagaagtaactactttttcttgtgggttctctggttctgtttctgggggatttgtcaccgtggtattagaagaagtttctaccgttggttgattttgagttgcatcaatttggcgactgctatctcccagaattgaacctgctggtactacttgctccggtgcgacggaacagttaaacactgtcgtagcagcaccaatacaagcattagccccaattttgccttggccaaccatcaaaaagccggctcccaggtttgctcctgcttctatttctaggataccctcattgacttgaagaattgaccccatgccaatacaaaccccaggaccaataataattttactgttggcagctgcttggagtattacccctggtgctattacggcggtttcatgaatattgacatcgccactcataagagaatcaaaactgttgcccaggcgtagcagcggcacagacatggaatttattacctcggaagccggaaaaattaatgttgaatattttgagataggtaggtggaggaagcagggaaagcagggaaagcagggaaagcaggggaagaaaaattaattctttattcttaaattctcctgactcctgactcctgactcctgactcctgactcctgccttctgtcacctatcacctaaaattatggacgctgaataattgcttctaacacgcggcgttttgctgcggtgtcgattccaattaatcgcacgtattcacctggatattcagagaggcaagcttctacagcagcgatcgcatctctttctgttctcgcttcaatttgtcccgcactcgcccaagtacctgtacggaaacggcgctggtctacgtgttctacgctaatttttaacccaccttgtaacaactgtctcagttgatctactacttctgcacttaaacgggtgctagttacggttgcagttccaccaccataagcagttgctgctggtttcgctgtgctagaagatactacttgaccgttaggacgttggataatggtttctagtacgcgacgtttagctttagcatcaatgccaattaaacgtacatattccccctgatgggaaaccatacaatcttctaatgctgctactacctcattagcagaatttgtttcaatgggttggcagttttgccatgtacctgtacggaaacgacgctcatccacgtgttctgtaccaattttgtagccattagccaaaagttggcgaatttggttaatggtttcggcactgaggctaccactggcaacagcaccgttaccatgaccattgccgttgtagctgctgtaagatgtagccgcaggagctttaaagctagatgtaccgttgctaactacaccatcaggacgttgaatgatggtttctaatacccgttttctaccattgtcaatgccgaacaaccgcacgtactcgccactgtggtctactaaacaagattctaaggcggcgatcgcctgccctaatgaccgggtttcaatagccttacagctttgccaagaacctgtgcggaaacgtctttgatctacgtgttctgtgccaattttataaccttgttccagtagatagcgcacttgctctatcgtttctgcacccaatttgcttgccacttcactactcctatccaattcttcaatggtaatgcttgtataagattttgccccagaaacattcagttcatcccgaattggggtaatacacttgagatcctctgcacagcgataaccagcccgcaaagcctgatttatccccacaacgtggtgagcaaattgctgatcctgatcttgtacatctggcaaacgatccgcttgttgctgggtcgtaataatagaaccagaagccacgtatttccccggaggaatttctacatcttgtattaatgcgtgcatcatgacgatgcaacctgctccgactctggcgttaaagacagtggagcgaaaacctataaagcaactgtccccaacataagctggtccatgaatcagcgccatgtgggtaatagaagcatttttaccaatccataccgagtatttctcgccatcatcaccaattactcggccttgctccaacccatgaatgactacaccatcttgaatattagtattttcaccaatataaaaaggtgtaccttcatctgctctaatcgaagttcctggagcaataatcacattctgacccaggtgtacatccccaatgagattacaagaagaatgtacaaatgcggtttgatggatatctggttcagctaaactcctagaccacggggttgggggtgccgccgtgctgcggactgccattgtgagattcctcctcaaatatgctttttgtcagtttttagtggtcagtaatcagtaatcagtggtcagtaatcagtggttggtggttattcttgccccttgctccctgctccctgctcccctgctatatacttctgtcacctgtcacctgttccctgactatctatattgatcttttttgctgtaaatgaaacgatcttcaacgtgaatggtatctattatcgccactactgctgcatctaacggacgttgttcgttaccaagaacttgacgagcggcactgcctctactgacaagtacccactcatctactcctgctcccacactatcggctgctacctcatattctgagaggagatttccgttttcatctactaattgcaacattagtagttttacaccccgcagacttggatctttttgggtgctaactactgtgccacgcactttagcaatttgcattcttaactattgtctgcttctgaaaggacgaattacgctgacaccttcccggaattgttcaacatcctcggtgtatctaattggcagtacatattccaggttttcgtgaggacgagcaattatgtgtgtagacaacacttgtccaccgttaactcttttcacgttttctactcctgctgctacagaagcttggacttcggaaacgtcaccgcgcacaatcactgttacccgaccgctaccaattttttcatagcctactaaggtaacacgagccgcttttaccatagcatcagcagcttctactactgctggaaagcccagggtttccaccattcccactgcaattgacattattcttttatccttaaatcaaatttttcaacaaacaacaaacagacaaattgtccacgtaagcaagcaaatcctttaaccactttattttaaaagtgtttaggttcggaactgttctactgcttctgtgtaccgaatcggtaatacatattctaggttctcgtggggacgagcaatgatatgagtagacaaaacttcaccaccattgactcttcttgcggcttcaattcccgctgctactgaagcttgtacttcagatacatcaccccgcacaattacggtaacacgcgcactaccgattttttcatagcctactaaggtaacacgggcagcttttaccatcgcatccgcagcttctactactgctggaaacccttttgtctcaatcattccaactgcaattggcatcgcagaactcctaaaaatttaatacaatctgtactatgggtgtatttttttgacggggatgctcattttgagcattgaagaaaaatacttctaaaattaaggatatgaaaccttggcatccctggcaacataaattactataatagtttatgataaaatacttttaaaaaacttaacaaaacttaatatacccaaaaaatacatcaaagttcacggtttcctagagtggccacttatgctttataatttttttattactttaaaaaatcacattcatagccagggctaatctgaactactcaggattgaacaaaggctgtatattttactgtctcagtctttccttgatttttgctattggcacagatattgaatgaacaatatataagatttttaaatataaagtataaaattcttttttcaaagtaggaagacaaatgttccatcagatgattaaagaagataattagtcagcattcagctatcagtaatcagttttaacctaattataagcagagaggtttttgatgaaattaaaagtttgcccaattccacaatacaaatttaccgactggcttttgtccttgtttttttaacaagattgctgaatactgaaaatcagtaaatgctgcgaaatctgtaaactttgtaaactttgtaaactttgtaaattttgtaaatttatatctaactgcccgtgaatagcgcaggtgaaagtaaaaataaagtaaaaatactgattcaagcgttttgagaaatagttaagaaaaacttgattttttcaaaattaacattttttaagcaaatgattgatttaaggctgtttaagaaaccaaagactgagtcgtcaaggaaaaattaaatgaatgaagttctatttttcaccagttggtttatacctttttataacttactaggggcaattttaacactgccttggggcattgggttaattcaacgtacaggacctagacctgctgcttacttgaacttgttgacgaccttactaggttttgtccatagcctgattgtatttcgagacatctggaacagagaccaagaaaatttattaattacttggtttcaaactgcggattttaaactaacctttgctttagaactgtcaccagtaagtattggggcaatagttttaatcacaggattaagtttattagctcaaatttatgccctgggttacatggaaaaagactggtctttagccagattttttgggcttttgggattttttgaagccgctttgactggtttagcgattagtgattctttgttcctcagttatgccttgctggaagttctcaccctttctacttacttgttggtgggtttttggtatgctcaacccttggtagtcacagcagcgcgagatgcgtttttaaccaagcgtgtgggagatttattattgctgatggctgttgtcacgctttccacccaagctggtagtttgaacttttctgacttgtatgagtgggtacaaaccgctaatttaagtccattaacatcaacattactgggtatagccttgatagctggtcctgctggtaagtgcgcccaatttcccctacatttgtggttagatgaggcaatggaaggaccaaacccggcttcggtaatgcgaaactctttggtagtagctggtggtgcttatgttttgtacaagattcagcccatattagttctatcccctgtggcgctcaatgccttggtaattatgggtacggtgacggcagtgggtgcaacattggtgtcaatagcccagattgatattaaacgggctttatctcattccactagtgcctatatggggttggtctttttggcagtgggtttagaacagggtggtgtagctttgatgttgttgttaactcatgcgatcgccaaagccttattatttatgagttccggttctatcatatataccacccaaagtcaagacttaacagaaatgggtggtttgtggtcaagaatgccagctactaccaccgcctttgtagttggttcagcagggatggtgacattattacccttgggtagtttttgggcaatgttggcttgggctgatggcttaatcaaagttaacccttgggtgattgcagttttagttttggttaatggcttgacagctttaaatttaaccagagttttccggctcatcttttggggaaaaccacaacagaaaacacgccgcgccccagaagtcggttggccaatggctttgccaatggtgactttaactatcatcaccctgctaataccaatgatgcttcagcaatggtacttactaccaaactgggaaagtattgattggtacattgtattagctttgatgacttccacggtcttaggggtggtgattggctcaacgatttacttgcataaaggttggtcaagatccacaattctgggctggagatttttacaagatttactagggtatgatttttacattgacagagtttatcgcttcaccatagttagtgcagtagcattattgtccaagatatctgcatggagcgatcgctatttagtggatgggttggtaaacttagtcggctttgccactatttttggcggacaaagcttaaaatacagcatttccggtcaatcccaaggttatatgttaactatcctcgttgtgatcagccttcttggtttctttattagctggtccttgggtttactggataaattgcctttttaggggactggtgactggtgactggtgactggtgactggtgactggtgactgggttatttacctcccctacttcctcctaaactcctaaactcctgaattcctcattatgatgctaagtacattgatattgctgccgttactgggtgcagctttaattggtttctatcccgctactctgagtgggaaaattgcccgtaaaatagctttggccttggcggtaattatttttctgtggacggttttcctgacaattaaatttaatccaggggaagtgggaatacagtttgctgagtcgttaccttggatagatgccttaggtttaaactataatttaggtgtagatggtttatccttgccattgctgttgttaaatggacttttaacaggtattgccatctatagtagtaatgaatctcttcaacgtcctaaattttattactccttggtgctgctgctgagtgcaggggtgacaggagcttttttagcacaggatttattgttatttttcctgttttatgaattggaattgattcccctctatcttttgattgctatttggggtggtgcaaaacggggttatgctgctactaagtttctgatttatactgcgatttcgggaatcttaattttagctagttttttgggcatggtttggttgagtcattctcctagttttggactagcaactttaaatgctcacaccctacctttagccactcaactattattattagcaggaattttagttgggtttggcattaaaattcctctcgttccttttcatacttggttgcccgatgcccacgtagaagcttctacaccaatttctgttttattagctggggtattgttgaaattaggaacttatggtttactcagatttggcatgaacttgttaccccaagcttgggaatatctagcaccaacgttagcaacatgggctgtaattagtgtattgtttggtgcatcctgtgcgatcgcgcaaacggacatgaaaaaaatggtagcctatagttctatcggacacatgggctatattttattagcagcagcagcagcaacacccctcagcgtcttgggtgctgtcatgcaaatggtgagtcacggtttaatttctgcgttgatgtttctcttggtgggggttgtgtatcaaaaagctggtagccgtgatttagaagtaattcggggattactgaacccagaaagaggaatgccagtgattggtagtttgattattttaggagtcatggccagcgcaggtatacctggaatggtgggttttatttccgaatttattgtatttcggggtagttatgcagtttttcctgtacaaaccctgttatcaatgctgggaactggtttaacggcggtttatttcttaattttggtaaatcgtgccttttttgggcggttatctgagcaagtgatgaatttaccaagagtatattggagcgatcgcattcctgctttaatcttagctgtgttaattgtggtttttggcatccaaccatcttggttagtatattggacacaagccacaattcaaggaatggtaaatactcccagcttagtagccactgcatcagtagatcaaggggaaagaaattaaaaggtgtaaggtctgtagtagagttttaggtaagaattcaggagtcaggagtcgtaggggcgaagcatttgggcgataatttaacggaaaaatcagacatctagatatcccaaatgcttcgacctgcccccataaataggttccataatttcttttatggagatgtcttttttatttatcttatttagacgtagttattgttgatgttctggagaaacactaatggttaataccaaaaacaaacccgttgatcatcccttgaatgagtttattcagcgtttacaaactggacaagctttactgaaagatagcccagaaaatgttttagaagtagtgggtattctgaaaagttatggtgtggttttagatgcttattcccaaaatcttatttacattgctgaacatcagtttttagtgtttttcccattttttaaatattttaatggtaaagtttctttatctcaattactgcatcattggtggcatgacagaattaattttgagtatgcagaatattgcatgaaaaccatgatgtggcatggtggtggtggcttagataattatttagatagtaaagaatttgcagaaagagcagaagcggtaatagctgctaaatttaagcataatcctttaatgttaggaattaacaacctgttccctgattttttaattgaacagttgcgagtatctgcctattatagtggtttaggtcaattttggcgagtcatggctgatatttttctcagcttatcagacctttatgatcaagggaaaattaaatcaattcctgaagttgtggaacatattaaagcaggtttggtaaaagatgctttaagacctattacctacgatgtgaaaattggcggtaaggtttatgatattattcctaaatcagttggtttaaaattcttgccagataccgcagttccttatgtagaagcggtatttttccggggaactccctttttaggaactgtttctttaaacgcccaagcatatcaagttcccccagatcaggcaagatttcaatatggtgctttatatgcagatcctttacctattggtggtgcgggtattcctcccacattgttaatgcaagatatgcgccattatttaccagattatttacataaaatttataagcgtagtttgcggggtgaagatgatctgcgtgtacaaatttgtatgagttttcaaaaatcaatgttttgtgtcaccagtgctgctattttaggattgatgccttatcctgtagatacaaaagatcaatcagagcaaacagcgaatcgggtatatttagaaaagtggatggatagatttaaaacttctcggttattagaagtaaatgaatagtacataggtatagacaaaagtttgctttagactaggtgaagttagtgacaacagagtgcaaaattaatgataatgagttagttcataggtcagggtgcgagagatcactcaatctcaaatggtagatagaatcaacgatatagcttggcaagctcaccagggcagcgttgccgctattattcaggtattgaacgaaagactcgtgatgtctggtgtcagaactagagcgatctttgctgatggtgtgttacaaattttatgtgaagcggctacggtagaacaacttgagcagtctaccttggtagccaacatccagcaaattttagagtccattgcaccgcgtaacattcgcaaagtcaagatcaacagtcgcattgtgcgggaagagcaattattatggttggaggaaattaaccgcaatagcgaaaatcaattactttggtcacaggaaattactttatctcagcctagtcttttccagcaattaattcaagattttacagcagcctatactgagtttggaaaaccgattttacccaaagctcaatctttactaactaaccaagataaaaacaaagatacaatcaagaagctgatcattggatcagttagtttgtgtgcattacttttgctggctgctttgtttgatgaacgtttaggtaattcaataaaaaatctgataccattacaaatttctccttctgtaaaaaccgcaggtgagataaaatcagaagtatcatcctctcatgctcaaaaaagccctgctcaatcggcaaatgatacatctgatgacaaatttgcagatgcagtgagacttgctaatcaagcctctgctgctggtaaaacagctacaacttcaactcagtggttggaattagctgctagatggcaaagggcttctgatttaatgagtcaggttccacccagtcatagccgatatcaagaagcacaaattcgtactaagttatatagggaatatagtaaagctgctgagaaagaagcagaaaaaataggtgataggtgactcaattttggattttggattttggattgtttttctcaactccaatctaaaatctaaaatctaaaatctaaaattattctgcctcctgcctcctgcctcctgatggctaaacactcatttctaacatccgttgcatgggtttgagtgctgcaagacggatatcctctgacatggtaatttcaggggtgcggtttttcatcgctaagtacagcttttctaaggtatttaaccgcataaatggacattcgttacaattgcaattattctcaggaggggcaggaataaagtgtttacccggtgctaatttttgcatctggtggatgattcctggctctgtagccacgataaactcatggctaggacttttttgacaataattcaataaagctgctgtagagccgatatagctggcgtgacgtaaaacgctggtttcacattctgggtgagcgatcgcctctgcttctggatgtgtagtttttaactcaactattttcctttccgaaaatgtctcatggacaatacagctaccttgccataacagcatatcccgtcctgtttgctgcattacgtaccgtcctaagttccgatctggtgcaaaaataatcggttgttctttgggtatttgctggacaattttcacagcgttggaactggtgcagataatatcgctcatggccttgatttcggcagagcaattaatgtaagaaattactagatggtctgggtgtgcggctttaaaagctgcaaactgatctgggggacagctatcagctaaagaacaaccagcatttaaatctggtaatagcaccaatttatcaggattgaggatttttgcggtttctgccatgaagtgaacaccagcaaacacaatcacatctgcatttgtctgtgctgctgctcttgctaattgtaaagaatcaccaataaaatctgcaatatcctgtatatctggttcttgatagtaatgcgctaatatcaccgcgttgagttctgttttcagatcctcaatagccgcaaataaatctagtggtagtgtaccctgtagtcgagagagtttagttgtaaacacaattaagaactgctttagattacaaattgttactttatagattcaattatagtagtttttaccaaaaatggtagacaattgatgaaggtaatttttgacactctccgggctgaagcccggagattcttgattcaacgagtccacttagggtttgctgttcgcgtagcgtgccgtaggcataaaagtcttgtcgtggagacagggaacaggcaactcttaacagggaacagtttcaagagttggataggaacgattttttcttgaagtaggaatattcttgcgtaggggtaattcatgaattacccctactttcgtttccttttgcgtaagtcctgtaataatagttgtagtaattgtctgaatgactatgctgtccattggcaactacgcctaaaacattaatggacgcatttttcatatcagttaaagcctgctcaaatacagaacggtctgttctatccatcctgacgatcatcaccacaccgtcggtttggggagcgatgtaattggtatcagctagccccacaacgggaggagcatcataaatgactaaatcaaaggtatcttgaaactgtgccatcagttttttcattttccctgatgagagtaacttaggtgcatcggggggaataggtccagaagtaatgatagataattcattcatagcaggtagtagtgtgactacattttctatggacatatccgtagtaattaaactactcaacccccagatattacttaaatttgccaaggtatgaatactagggcggcgcaaatctgtatctaccagtaatacttttctccccatagttgcagctacttgagccagataaaaggcaattgtacttttaccgtcaccttgcatggaggaggtgatggtaatagaactgatgggagtatcagagcttaataattgtatatttgtgtagagcactctgatggcttcgataaaattgttagcgtaattggtgtagtgccgtttggctacggtggttctttgggtagtagtttccatctgcccatccgagtattttatcaaagcatttttgagtttgagagtaggggatttatcctgctgcatttcttgattaaagggaatattccctaatacaggaaatttgattctttctttgaggctcaaagcgttgtgataagtatgatctagcttttccaagagtaaagctgcaccaatccctagggagatactcgcggcaattcccatgatcatatcccggatcatagttgaagagacagctataggacttatgggtaggttaggtgactgaactaattgccaaccttgttccgtctgagaggattttttaatgagcaaatcttccctagctgataaaaaacgattcagactttcattagcaatagctaaacggcgttgtatttctgtatattgtcggatcagtgtaggtaattccaggcttttccgttctaaaattcggcgatttgtttccagttcttgttgattaagttctaaggatttgagtaatttatatgcttctgctcgcttagtttggatatataattctgattctcgctcgattactggtctgatgttgttctgtttttccttgagtgcaattagagcggggtttccatcttgaaaaacagctgattgtgtggcaatttgaatatctaattggcgcaattcttcatttaatgaccgatatataggatagttatccaggatagacctgacaccatcttcagtttgtaagaaattccaatcagcacgagcttgggctagtggtagttgtagttgttgcagttgttgatttacatctgtgatttgctttccaattgtttctgctaggacttctggactgagaaagttatgcctacgttggaactgttctaatgttgcctgaacctggttgacgcgtctttgtatcttgggtagttcttcatctagatattttaaactttcactgagggtattttgcttttgttgttgactgtaagctatataatcggcagcaatttgttctagtacatctttggattccacagggttttggctacgataattgacttggataattttggtttgacctacacgagaaatcctcagaccccgagtcagatatccatagttgatgtttggatagttagcttgtaactgtttaatgctgttttgcagaatatcataacccaacatcacgagaatttgagtttcataatcgaaactctttgtaattgttcggttgatgttatcgcctaagtttaacaactcactcctattatcaggggtttcaaccaggattgtaaaactgctttcatattctggtgggatttggggatttaagtaaatctttacacctacactggcaagtacagttgtagctactcccacaacaactacaattcgacgccttaacaaacttaaaaattctttgtaattccaatcctccctttgttgctgattttcttgttgctgattttccagaaaagggggatagggaaaaaatggagtgatggagtttctcgtctgttcgggatttacgggtttatcagtttgattgtggatattagacatattttacactctatttttactaagtacgaagatcagatgaaatccaatagacatctggtgaaaattaaatatgcgtaacctgaaacccattcgtaggaacaattcatgaattgtccctatatctttttcaaagaggtctaatatagagtagttaatccgtgaactgttgacacttgatacctgctgagtagataacactttctatcaatacactattttactactttgtcaatgcgtaagtcctatttgcttcagtggttttggctcactccatttccttataaatagcactcaatgacattaattttgcagttgcaagattgtctcatatgtgattataaatgttaaggtgataggggctaaaagtacaaaatgcctacatcctgtgtgtccttgctatctaataaatacaagggtattagtcggatagattcataaagatttatacagtgttgatacatgaaataaaatgacattgtgatattgtgatattgtgatattgtgatattgtgatattgtgatattgtaacattgtgatatttaagtgctgaatcctgcgataagattttttaattgctcaagtttggtatcaccaataccaatgcacaacttgaacaatattctcaaaatcttaacattcaactcttctgtgtagctacataaataacagcttagtattagcttgaattaaaaattaattgcgatgtatgaagaatgctcaacagacctacaaaccattaggactgtcgtcggtagatggtacaaacaagggtgatgattgtttctatgagcaaacaattaagttatctgtagtgacacagttttttcctccagactatgctgctaccggacaattaattgaggaacttgtacagcagttagaacagcagggggtagagattgatgtgtttaccagtcaacctggatatgctttcagggtgagtaaggctccccgtgtggaactgcgtgagcaaactaggattcataggtctcggactgcgcaaatgtggactgggagaattcgcggaaaggctgtaaatggagttttatacagcattcgtgcttttttgtatctgctctcaccttggcggcgaagtaatgtgttactgatcacaacagcaccaccatttttgcccattgtgggttatgtggctaatctgctgtggaagttgccctatgtttgtatagtctatgatttgtatccagatgtggcgatcgcactgggtgtagtatcaaagcagcactgggtaacaaaactttggcaagggttaaatcagcgagtttggctcaaagctgggggaattgtggttctcagtccagagatgaaacaacgggttgtagaatactgtccccaagtcgcccataaagtttctgtaattcatagctgggctaacccagatttaattgtacctattgccaaatcaaaaaactggtttgcttggaagtacaacttagtcaataaattcactgtcctttactctgggaatatggggcgatgtcacgacatcgatactttgttagtagcggccagagaattacaacatgagtccgtgcagtttgtgtgtattggtgggggtgctaaacgggaagagttgattgctagggtctctcagctagagctaagtaattttacatttttaccttatcaagataaggaagatttagcctattctctcacagcctgcgacctgtctttagtgagtgttaaccccagcagcgaaagtttagtattgccgagtaagttgtattcagcattatcagctgggaggccattggcggtagtttgttcaccctactctagcttaagaaaaataattactgacgctgaatgtggggcagcatttgaccatggggatggtcagggactggcgacatttatccgtttattgcaaagtaaccaaacactagcagaaaagatgggtaaagctggccgtgagtatctacaatcccactttacaccgcaaattatttgccaacagtatcttgaggttttactgcaaacagtgaatattaaaaagggtaaaaatttttgaaattactgcttgaatttgtggtacaattgacttgtgtaattagggcttgctgaataaacccaaaatactcgtaaatcaaaggtttgaagctgatcaggaggaaagaaagtgcaagatttttgaagggtataccttaaaaactgtgcattttgggtctgataaattagaaaatctggggataacagatagctaaaactattccctattccctattccctgcctcaacgaagggactttttcagcaaaccctaattatgtgtaataaaataagataaacctaaaaatgaaataattcctaacggggtttttcatctcaagtttatcaagtgaattaaaaaaaaataatagttactttcagtataagctgatttttgtggagtgggctttgatggtctgattgatctcagtttctccaaacctaatcttcctattgattttgatattagggggacgaattgcataaaaggtgtaaccataatcggaaacgttccaaacgtagagctatttactgtcctattcatagttgttatctagatagtgtcagtcgcaaatataaagttacgtccgattcatcaaagttaaaaaacacttgtgtgtccgtacccataaaggaagagtggttagaagctttttggtgtccacaatgccagaagaaaaattggtattatgtgcgtcagttggatgatgggacatatgatgtccgtagttatccacaggggattcggggaattcattccccggctcctctgtgtcaataacctccagctaacgtaaacaaggctattcaaaaccggatcatcattttttggcaatggtctaagaggatgtttgataagtcatgattaatggatcaaatattgttttatcgcaccctaaaccttcctggatgaaggcccaagctcaagccactttaaatttatgtcagcactttgtcagggaatatccagatattttgaaacaagctcgaccccaagtaggtaagtcctcattttatccccggcgttgcccccaagatagcgaactaaaccctcacctttcttttggtgagcagtttaatttattacgggtagtggataattagcgctatccggcatttttccattgggcgggtaagtgctatgtgattaagatttattgatggttgacggttcgacttcgctcaccgaccacggttgactgtattaaggggcgatcggcttggtgctgctgcgcttcgcgatcgccattcagtatactcgatagagttgcgaggaatgaattccctggctaaaagcttaagtcggttaaagaccgactgagaagggggttgaaagtttttgtgtgatttgtcacaagatataggatatagggaataggaatggatgggaaattagtgtgtagttgattagacacacagaaaactatgatacaagataaacatactgataacttataagctgttacacagctaaattgtataatcctaatattctgaactcttgtggaacaggcatcttgcctgttccacttatacaaattaaatgcacaacagcttaaccaatcaatggttaaaaaagcagacatagggggaaaaagattaatcagtctcgcacccaacacctgggtaaaatggattacccagcgcagtgacttacaagtacaagacatcctcaacacagaatttcagtggatagagcgggaaagtgatgttttactgaaggttttatcgccagaaataggggaatttttgctgctcaacgaattacagctacggtacaatcagaaaatgccccgaaggatacgggcttatacagctttggcagaagagcgttataatttaccagtgtatccagttttaattaatattctgccaccgagcagtaaacaaagcattccccaacgttatgaatcagagatattagggataagagcctatcaagattaccaagtgattaacctgtgggaagtggatgttaatctggtatttgagcagaagatatcaaccttattgccatttgtaccaattttgcagggtggaaacagggaagagaaattacgccaagcggtgagggagttaagacgggatgagcaactgcaagacttagaaccattattgtcattttttgctagttttgtattggatattcccttagttcaacaaatcatgaggtgggacatgacggtattaagagaatcgccctggtatgaggaaatattgaaagagggattacagcagggggaaaaacagggattacaacagggattacaacaggggcgacaacaaggacgacttgaaggggaaacccaattggttctacgtctgttacagcgtcgcttaggaaccttggatgatacactcaaacagcaaattcagatgctaccattagagcaactggaaagattagcagaagaattattagactttagggatgtggaacagttacagacttggttggaaagcctttcttgatggttgacggttcgacttcgctcaccgaccacggttgactgtaataaggagcgatagacttagtgcaacagtgctagggcgatcgccattcagtgatgttgtgcaccaaggggcgatcgccctgaataaatgtcataattacaacaactaacaataccttcgccaaaatcaaaaatatcttaatttgtaggttggattgaggcacgaaagccaacaaatacgttgagtttacgttgggtttcacttcgttcaacccaacctacggaaaaatggcaaaggtattgaactaagcagtcggttaaaaaccgacttaagctttcagacagggaatttattccctggctgactttgagattatgagactatgagattatgagactatgaagttattccccatctgactgaccggagcattttctagaacaaaaagagcgatcgcatatcatttggttctattaaatatcatctaaattactttatgtcctccgctgataccatacagatttaccaccgaaataacgtacataatatacattacctttcgtaccaatattaaaaggaggaggaaatgaaaacatagtcagaaaagcagtagtagaattacgagccaatgaaactctaacagatttagaaccattactatcattttttgctagttttgtcttagatatacctttagtacaacagataatgaggtgggatatgactattttaagagagtctccttggtatcaacaaatattaaaggaaggtttagaagcaggagaaaaacagggtttagaactaggtctagcaacaggtttacagcaaggtttacagcaggaaagtctcaagttagtaaagaaattaattgaccgtcgttttggggctttatcatcggagttaaaccttaaaattaatcaattgtcaacttctaaattagaagatttggctacagatttactagaaatcactgagataaatcaactggaaaattggttacaacaaaatatcagttaatcaaaaatttatgagattaattgggtatgatgcagcacggcaaaggtgatcgccttgctgcactggcgctatcgcctttagtattgaagaaatcaagtcttgacttattgtaaacaaccttaaccgaattaatgactttagcaaagacagtgaagctaggacgcagatcagcctctaggtttttgaatcgttacctgaaaactgaagcagatcgactgattttgcagtctgcatgggagaactggggtttaatcctagccaactttgtcactggtattataggggctatgtttgaagggggaacctttggcattatcttcttggcagttgccctgttgagcactccccaaggaatagactggaaccagtatgccatcttagcggcagtccccggactagggagttggttgaatgcccttggtcaggaggtgttatttattctcttattaggactagcagtgacagcccaaatcttcctggggctttgcaactattggaatgcggtgactgcgggggacttggggatcagattacaggttaagttcacagagtatattcatcgcctgattctcagttttagctttgcctgtgccagtcgttataaggtaggagatctaacttcctatgccactagcgctgggcccacggttaaaacccagattacattagctaatactttgatcactaactttttgctgcttttggtctatctaggcattctggtggtgatttccccttggctgttattggccgctctgtccactgtcttagttttttatgttatccaaaagcaattactgccccgtatccgccattactctagtgttaatgagcaaggactggtggaaattagcaaacaggtaaccgaaaatttgcaggggttaaggctcttgcacaccacaggacatcaatccagggctgtggctcaagttaaggcattagtagagcaggttaaaccagggctgcaaaaacagatccgcttactgaatattaccaatcccattacccaaaccttaccggtcgttttgttggctattattgcgggtattgcctttttgctgttttcccggcggagcactggggtgttacccagcttagtcacctttgtcttggccttgcaacggtttaatatccgtcttcagggtgttactggagcggtcacggggtttgctgataactatggtaggttagcccgctttcaagagattcttaaccccagggataaggagtttgggcggctgggaacagtaccctttactaacctagccacagatattagcttcgatggggtttgtctgcgttatttggctgatcagggggaggtactgcaagatattaatcttgtcctacctttgggcaaggtaacggccctggtgggatcgtcgggggcgggtaagtccagcttggcggatttattggtggggctttatgagccgaccagaggaaagattttggtcaatggtcgggatttgcgcgactatgatcctagtagctggcggcaacgattaggggttgtcagtcaggatacttttctgttcaatgccactatccttgaaaatattcgtttcgcttgtccgactgctacagattgggaagtgatggctgccgcccaagcggctcaagccgatggctttattcaggatttacccttgggctatgacacggtagtcggcgaaagggggtaccgactcagtgggggtcagcggcaacggatcgccctggctcgggcgattttatccgatccggatttgctaattttagacgaggctactagcgctctagatacggtttcagaaaagcttgtccaagaagctttggataagtttgggcaaaaccggatggtgttagtgattgctcaccgattatcgacgattgttaatgcggatcagattgtggtgcttcagcagggacgcattgtggaaaggggaacccacagtgagttactggggttgtcgtcgggtatctatagaaattattcgcagttacagtcaagccaaaagaaagtgccgttgtcaccttcacagaatacttgaaatatatagggcttgctgaataaacttaccattaaaataatgcctaacttatacattattggtggtgcaaacggttctggtaaaactaccgccgctatgcaaattctcccctattttctagaagtatttgaatacgtcaacgctgatgaaatagcagccggactttctccttttaaccccgaatctgtagcagttcaagccggaagattaatgttagcaagattagaaacactggtaaatgctaacactgattttgcctttgaaactacattagcagcccgtaactttgcccgatttttgagagaatgtcaagataaaggttatatgattaacttaatttacttttggttgcaaagtccagaattagcgatcgccagggtaagcagacgggtagaaagtggcggtcacaacatcccagaagacactattcgccgtcgctacgaacgtggtagaaagaacttaattgaattatacttacctttatgtgatagatggattgtttatgataactctaacccaattttacagctaatagctgaacgccctttaaatcaagaacctatcatttatcaacctcaactatggagtcaaattactactaatgaataagccaatttctgtaaataaaccaattcctgagaaattatctagccaaattgatgcaggtgttaaactcgctattgctaaagctattgaaagacaccgcaaattaggcgaggcgattagcatttggcaagatggccaagttgttaccttaactcctgaacaaattccacctttaaactcagatgaataaactatattctctcattctagaataaattccacctttgacttcagatgattaacgtattttctcttgttccagaacacatccgagaaaaactaacactcacggatgataaaaacaaatattgcaacaacaaactattagtcaacataccccaggtacaattttatcagattgtggtgcttcagcagggacgcattgtggaaaggggaacccacagtgagttactggggttgtcgtcgggtatctataggaattattggcagttacagtcaagccaaaagaaagtgccgttgtcaccttcacagaatacttgaaatatatagagtgtaaattcagtgttaacaggatctaaaaaattactgtgtcgggcctgtggttctgatcgtcttgtttatttatgggattgtgccgaatttcccaatggattactcgaacaggtcggactatcgaatctttcccccggtcagttatatcgttgtcaggactgtgggttaggacaacggctaccttgcttaacaggggatgaacttaaacaggtttatgctacagcgccgggtggcgcgatggattatgagttggcaaagaatgcgggatggtcaaaaagtaagacgttattgctagagtatttccagaatcaagagtctatttctgtcctcgacgtaggttgtaatgagggaaagtttctggataatttacccactcattggcacaagtttgccattgaggggggaattcaaccggctaaatcagctggtgctaagggagcttgtcctaagttgacaatttactagacaaacctatacaagtacatacaaaactacaagtatttgacgtatacatggaataagttgactaaaaaattaggcaaaatgtgtcagaattaaataata

SEQ ID NO: 42 - DNA, 46079 bp, Sphaerospermopsis sp. LEGE 00249
  LEGE00249_57
aaggcacaggggaataataaaacacctgaccaacctacgaatacgaagcgatcgcgctttaaccagtcgtctagtacgtcaaaccaccctcttgacggggcgcgtccaactgctatggtcatgagaaagaatctccaaaaatttataagtacggattttgtctgtttatgggtggctatgacatgaccttccataaacagaagtataaccaaattgtcaacctagtttacaattttttacggtctctaatcataataagtgcttttctctaatttttccagtgttataaaaaaaaaggctgaaaacccttgaggttaagtttttccgccatgttccaaaacttaaccgtgctttaggcaaggggacgggagttgcttcaagccgggagacctgtccaacccactgcctcagcaatacaactacctcgcccgctgggggaaagtaacgcttgaggagagaaccacctcgcttgtgagacaccgcaagtgatctagtctaagtggactcgttgaaccaagaatccccccacctttaggtagggaatgtcaatgaagataaattttgatcttggtcatgggtaatggataatattattcccaatccccaatcaccaatccccaatcaccaataacgctagaattattcctacagtcagtgaaatgtgattaattctaaatgtttaccatcgatttaagcatcagaaatactgctttcccgatctcagtacaacgtaagtctgctgaagatgctgaagctgtttatcagctgattttggcagcaatgcgtactggcaaccctgatcttgttgaactcaagtgcgaaggcaaaactgagaaaaaaattgctgtccgtgctagtgaaatttcgggagtccaaatttcgcagaaagatggtgcagctagtagcagtggtaaacctccgggctttgctgctttcactatggctgaataaaccaaggtataaaaatgacggtagtaggcattgaagttaataatttgaacttcttttggcctagtggggagcaagtaattaaatcttgctctctcaaagtccctaaaggtgaattttggatgcttttggggactaatggcagtgggaagtcaactcttttaaggttaatagctggtttattagctccccagtctggggaaattggtatttctcctcctgtgggttttgtgttccaaaatcctgatcatcaattagttatgcccactgttggcgctgatgtggcttttggattggtggaggaaaaactacctcctgctatggtaaaagctagggtagaggaggctttagacgcagtaaatttactatctttacaacgcagacctatttatgcgctttctggtggacaaaaacagcgtgtggctattgctggggcgatcgctcgtcactgtgaagttttattattagatgaacccacggctttattagatccagatagtcaattagatttagtagctagtgtgcgtcgtttggtaaaaaatcgcggtattacagctttgtgggtgacacaccgtttggatgaattaaattattgtgatggcgcgtttttattagaaagaggtgttttagttgacgctggtgaagctgaacgcctaaaacagcgattaatgacaatagatggggaatctttgtgaaataggtgacaggtgacagttgatagacaagagatatgaagaaatttcttatcttttgccttctgttacctgttcccttaaatataacttaaatataagaattatttattttgagataaaaaactgttataactcggatttttagttgcttttcccaagtattgctctctgtcagagggtgtattttcattatgggaggcattttttattttctgtaacatgatgttacaagctatacttcaattactataagtcttatgaatgatttttgttaactctagataattgtgattaaaaaccatgccccgttctatcatcccatccattttgttagtggatggttacaacattataggcgcttggccttgcttgaaaaaaactcgtgatgatgctggactagaggcagcacgcggtgaattagtggaagctataactaattatagcgcgtttcaaggatatgaaactcaaattatctttgatgcccaatatcaaaatgctgctggtagtcgagaaatgattacagaattcctcacagtgcattacacagactttggacagaccgcagatacttacattgaaaaagcttgtgcgggtttacgtcaccaaatcgcccaatgtttaatttctcgcgtcattgttgccacatcagaccgagcgcagcagttgatggttcaggggtatggtgcccaatggttatcagcacatcaattatgcggtgaagtggaagctacggtttgtcggatgcgtcatagatatcaacccaagaaacaacccaaaggcagatttttagctaatgctattgatgatcaggctagacagaagttagcacaattaagaatgggactttaatttacgattggcaaaaatgtctgaactccttaccgggagtggctttagcctggaatcaattatatagcaagagtcaggagtgaaacccttttgtagtcagagtttcatgattaattgatgtcctgactactctgtgtacggctatatgtaccagcagtataaaaacaacatcgaaaattaaataaaaaaataaataaaaaaaattttgccaaagcagttgacatcatctgattttcagtctaatatagtaatcgttgcgagcgttcctcagtagctcagcggtagagcgatcgactgttaatcgattggtcgctggttcgaatccggcctggggagttcaataaatagaggataaagcatgaaggaagaaaacgcaaatttcaatcttcatgcttttgattttgagaaattttggtcacttgaaccagaggtgatatttctcaatcatggctcttttggtgcttgtccaaaagcggttttggaagttcagcaaagattacgtcaacaactagaagctgaacctgtgcggttttttggtcgagactgggaaatattaatagatcatgctagaagcaaattagcaaagtttgttggtagtgatgttgaagatttggtatttgtgccgaatgcaaccactggggtaaatgctgtactcaggtcattgagttttgcaccagcagacgaaattctcaccactaaccatgaatataacgcttgcagaaatgccttagattttgttgcgagtcgcacaggtgcgcgggtggtggtggctaaaattccttttcctattgcttcaccgcaagaagtggtgacagcagtgatggaacaggtttcaccaagaacaaaattagcactgttagatcatgttactagccaaacggcgttaatttttcctattcaagagttagttaagcagttgcaagcacagggagtaaataccctggttgatggttctcatgcaccggggatgattcctttaaatttagtggaaattggcgcaacttattatgtaggtaattgtcataaatggttatgtgcgcccaagggtgcaggttttttatatgtgcaaagggatcaacaaacaaaaatccgccctttaacaattagtcatggtgcaaattctccccgcactgataaaagtcgctttcaattggaatttgactggatgggtacggatgatcctactgcttatatgtgcgtaccggaagcaattgattttatggattccctgttacctggtgggtggatagaattaatgcagcgtaatcaccagatggttttagcagcaagaaagttactttgtgaagtgttggaagttgcaccagtttgtccagaagaaatgattggttcaatggcagttttaccaatttatggaaagttggcagattgggattttatgtttttccatgatcagttattggatagatttggaattgaagtacctgtgataccttgggagggaaatccgcgtttgttgatccgagtttctgcacagatttataatcaacttcagcattatgaggatttggggaaggtgttaaaagatttgttggattaatggatagatccccgacttcttgaagaaatcagggatctgggtgattaggtatggaaaatcaccgttaccaaaggcagaaatgctaatagaaaaatatgccaagattgtaatggcatttctgaatttggttctgttggtgttaacaaagcgtctattctttgttctaacctatcaaccgcagaagaacctaaagctgcacagcaaacttctgatgttagggtttggttactcaccactaacaataaagattcagctaaaattaggggatctacttgggaagctgcataactatcagcccttaattctcgcaacattaataattcttgccaaagtgcttctgtattgggcaaccaggaggtacaagaacgcacccagccgagccaaaaaaaccagaatgtatccctatactggtaatgtccttgttcgtgtgcgaggacgctttctaggtgttctggggagagagtttctagtaatccttgactgactactaattctggttgccaaaatcccatttgaccggcaaataaagcctttgtttctaggattcggacttgtttacctgctagattgatttgtggacattcacaggcagattttacagatttccaaccttgaaaagcctgtttaattcctaaaatgttgaaaatagcgagaaaaattaaggacaggagatagctaaaagaacctgtagacattccccccattttaccctgtgtacccatgcaaaacacagcggtgacagtcatgaagatgagtaagggaggaaagaggaataaaaatagagtttttcgccatcttaaatgccaatttcctgcggggatgtgggcataatgtcgtaaactgtaggcgatcgctacagcaattaaaatcatgagtaggtgcataatgtgatttgtctcctatttttctcccctggcttgacgtgcagcttgaatgcgtttggcgatcgcttctatttgttcactagctgcttcatctaaactatcagcaaaggcggcaactacatcaggattacctactgctaaaaatcgctgtagttgctcatgggctttaatcatctctgcttgttgttttgttagcagtggccgccaataaaaggcttttccttgtttatcgcaagctaaccaacctttttccgtgagacgacgtaaaacggtggtgacagatgtataagctagttcgcggttaggatcggcaaggatgcgatcgtgtacatctttgactgtagctgaaccaagttcccagacaatgctgagaatttctgcttccaaaggaccgacggataattgcttaggacggtaatctggtaatggagccatgttgatggtttgagcgatgaagttgtttatatttccaggttacagtttgattgtcggtttgccactcttaaaaatatcaacttaaacattctcaactggctttaacttaaacttaagttaggtcacgtcaggtaaataaagcaatgacacagacacaagttgcagtatctttatatgagcaagattatttactgtggattgaagatacagtcaataagttacggagtagggatattgaggggttagattttgagaatctgattgaggagatagagagtttggggcgatcgcaaaaacacgaacttgaaaaccggctaggagaacttcttgaacatcttctcaagcggacttatgtaaatatgcctgattgttatcgtggttgggtagaatccattgataagcaaagggtatctctgaagcgattactcaaacaagcaccgagtttaaagccctattttcacgaagtttttgatgaagtttacgaagatactctcaaaattgtgcgtcggggttatccgcagtgcgagtttcctgatacatggctatttagtcctgatcttgaagcgatgctgaatgtggatttttgggaagattaaaaatgagaaatcctcatatagacaatctcgagttttttctatcttgaaggacggttaagtttttctgccaccctccaaaactcaacctcaagggttttcagcccattttcttataaagatcgagatttgaagatagccagtgagtgacatcaagtgggtagaatataaccgcagtagtatagagcaggtatatctagcccgtgaagatatttgtatatcatactccagaattaaccccaactgaggcaacgccagaatgcgcgatcgctgttgatgttttgcgagccactagcacaatagcgacagtgttagcggctggaggcgaggcggtgcaagtttttagtgatttagatcaactcatggcagtgagtgaacaatggcctgccgaaaaacgattacgggctggagaaagaggcggcgcaaaagtgtctggctttgagttgggtaactcgcccctagattgcacagcagaattagtacaagggcgacgcttgtttatcagtaccactaatggtactcgtgccttacagcgcattcaacaagctcctattgtccttgcagcagctttaattaatcggtctgcggtggtgaaatttctcttagaaaaacaaccagaaaccatttggatcgttggttcaggttgggaaggtagtttttctttagaggatactgtttgtgcaggtgcgatcgctcatagtatttggcaacaaaccgattcttccctggaagaaatagctgggaatgatgaagttaccagtgcgatcgctctttattcacaatggcaaaatgacttactgggattattccatcaagctagtcacggtaagcgattattacgcctggaatgtttagaagatttaaaatattgctcccaaaccgatattttagatgttttaccaatgcaacacgaagcaggtgttttaaaaagtcagaatcagtaaggaggcaggagttatgtattttggattttggattttggattttggattgtttttgtagtctccaatctaaaatctaaaatctaaaatctaaaatctatctccctatctcccttacttaatagctgataaaggcacacctaaccaacctaaaaagttctcttgctgagtagtatcaggatcttctactggacgtaattgatatttatgaggatgttgtggtgctaaggtgatggaatagttacgcagttcgtcttggtggaaaacagtgatattgatagtatcgttgggttggtaatcttttaaccgttcacttaactgattttttcctaccttaataccatcaattgccaataattcatcacctgcattaattcctgctgtgtatgcaggagaacccatctcgacaaatttaattatttcctgtccatgttcagttttgattctcacacctaaatatggttctgtctctaattcttctaccaattttaaaccaaaaggttctaaatattgattgaatggtaactcatccaatccatgaatatagcgatcaaagaaatccgttaaatcagtgccggagacagtttcaattacctcctttaattgttctggagtataaccaatttcttctttaccaaattgctgccacattttccgcatcacatcatcaaaagacaattgattatgatgaagagagcgaattaacaaatccagcaatagtgataccatttccccttttaaataataggaaatttgcgaattaccactattagcatcttgacgatatagcttaatccaagcatcaaaactagattcagcaagtggttgtactttccttcctggcgttttcagatatttggtaatttcttcattgacatgatgaaagtatgatttaatatcataaattcctgcccggaaaggaattactaaatcatagtaacttgtagtaccttcacaaaaccagagagaatcagtataattttcttgatcgtaatcaaaaacttctaaccctttgggacggattcttttaacattccacagatgaaaaaactcgtgggctactaattgggtaaaacgttcatatttatcttgaatatgaaatccaaaccggtgataaattaatgaacatgagtttttatgttctaatccgccataagcctgatcaaataaatgcagtataaacaaatatctttgatagggcaaaccaccaaacatttgtgcttcaaattcaatgattttatggaaatcttctagcagtttttgcggtttgtagtttccttttccccaaattgctaactcatgaggttttcctaatacatgaaagtgaaacaaatcatgattaccaatttcaaatggagtatcaacaagagtatcaaaatctgctgctaggaaggtattggcttcttctgtaactgctggtaaacctgtggttacttgccattctgggtgtggtgggacgatggtaatatgaattggtttttcttcccaaccggggattcttaaaaacagcgccgcaccgttaaaataaccatgagtagcatctaaatgatttgtgcgtactgataattcattggcaaaaacgcgataacgcaggatgacttcagcagcatcacctttttctatctgccagtgatttttactgatttttcgccagaataagggttctgagccggcaaaggcagcaaaatcttgtaaattcttagcgtattctcgcactaagtatgaacctggtgtccatactggcattttcaagtcaagaattggtaatgggtagtttacaaggtgtaatgttacctcaaacagatgattttctggttggggcattgctacccaatagtgaattaatacattagtatggggtaattgattgttactaagaattactgttgaattattcatttgctatttcgacggagtttgtaactgcttaaataaaaagtttttaatcactaattactatagtcattctctttattgaaccatctcaaaatagcaagtcttgttaaaacaagtctcttcaaaatagattatacatgagttaattattttttttatgacagttcgtgaattgtcactcaatattttggactatttctataatttagataccatattctaatataactatacaaattttggttagtattagtaacttaaatatccatcagtaatcactatttacttaattgatttatttatatgtttttttttacacttgacatcaattcaataataattaggggttgctgagaaagtctttccgtgagggcataggagtcaggagtcaggagtcaggaggagatttgaaaatttctttgccatctcttgaaatcccaaaaaatgcacactttttccggtatacccttcaaaacccttgcactaatttctgtgtttatcagcctctaacctttgatatatcaaggttttaggtttattcagccaaccctaattaaaacttattagttaaaatctctagctgtttgaggttaataaattgacacttcctgcgcgtttacgtgcggggattcttggttcggtgagtctacttagactagatcccttgcggtgtctcacccagaggtggttctctccctaagcgttactttccccctgtccgggggtagttgcgttaccgcaaatttttttcataagtctttaatatacctaaaaatctgtaatgataggctttgtatatgggaatgacaccaactacacttacagtccactatatattctttcgtaaagtcatcctggcaggaatgatgtgagacccaattttttgataaatctaaagaatgcaggtgcataaaaaaacacattaaatgcaagaaaatttattgacacactcaagatgcaggaaatggggtataatagacaacaaaaacctatatcctctgccttatgccgaatcaagatttcaccccaaagttgcgaaattttatgcagcgtgtaggtatctctagttttaaatctttgagtgacgctgctggtgtttccgagtggcaaatcttgtgtttaagacggggaaagctggagcaaatacgggtagaggttttgctgaagctatcaaaaatcctacagatatcactgggtgaaatagtagcagcgttttcaactgcaagttctgattcccaagttgtaggttttgcagtcacaactcacaatttaggtacggatgaacaattattacaagaaattactgatttgaaaagagagtatgaacgaatcgtgctgatgctggaacaacagcgagaggtgttacagcaagagtttcagcagtcgagtttacaaattttggaatctttattgttgttttggcctacagcagcacagaaagcaaaggataatccccagctagaagcggttaaaatactacctgtggtgcaaaagcctctggaaaaattattgcaagcttgggaagtggaagcgatcgcctctgtgggagccgaaataccttatgatccccaatggcatgaattattgcagggaacagcccaactaggcgaaaaagtcaaagtgtgttatgttggataccgtcaaggtgataagctgctttatcgagctaaggtaaatcctgtgtaatgatcaattctctgaatcagttgtgtaaaataaatcttatagttaggagttcccccgaaccatttgttaaattagcataaaacaaaatatgtaatatcaactattgatttgtagagaataaatttctagctaaaagccgatgtctatcagtgcaaatttgacaattttttataaattttttattagaaaattatatttttttattcaaaattttatattgcataagctatttaaagtaagtaaatatttctatttttctgatgattatttgaggaaaatttattatattggtatatactagctacaagagaacaccattgatatcaatcagagtaacctaattatgagtcagcaggtgaaagttcttacacttaaaaaaaatttaaatgctgaaactgcatcagaatttcagcaagatattgcccaaattttagaaagtggtgtaaagggtgtaaagattgtcttagttgattgtcaaaatattacatttctggatagttctggtttaggctctctaatattagcttttaaaaccctacgagatgctgacattaaaatggttctctgctcggtgaatgatcaagtgaggatgatatttgaattaaccagtataaataaagttttggaaatttttcctagccaagatgcttttcatcaagtcttactagctacaagttaatcaaatttaatttgcagaatagataaatcatcatcaaaggattctttggagtttaaattgattaaatatttcagtatataatcaagttggtaatcaaccgaatgttgtaagctaactagcaactgaacaaatccatccagactccaaagattaccatctgatttagtaatttcataagcgccatcgctaaaaatgtaaagactactgcatttttcaatttggtaagtttcatccacatattttgcttcaggaaacatcccaactggcattcctggcgtttttaagagttttatttctgtggtactgcgagattttccagatactaatactgcgggtggatgtccagcacttgcataaattagctggcgattgatgcggttgtatacaccataccaaatagtaaaatatttatcattttggtagttaatctgaaaagtgtcatttaaagcttttaacacctgactaggctgataataattaagttctttgagcgcacgggaacgaagcagattgagtacagatacagagggaagagttgctctgagtccatgtccagcagtatctaataaataaattgccaaatgatcagcatctaaccaataataatcaaagcaatctcctcctagttgtcgtgagggaatgaatcgagaactaacagtcagaggtgtagacatgggtaagggtaaaagggatttgacatattctgctgcttctgctagttctgtttctaacaatagcttttgggtttgtaaatcccgatttaactgatgtagacgtaatccggctctgactctggcttgcagttcattttgttcaataggtttggaaataaaatcatcagcaccagcatctagtcctttgacgcgatctgcaactgaatctaaagatgttaataaaataaaaaatgtggaggataatttagggtctttcttgatgcgatcgcagacttctaatccagataaacctggcatgatccaatcacaaatgattagggctggaggacaagccaaagcttgtaaaatcccttcttgaccattattagcagtgattacttgataaccttgtttttctaacatccttttaagaaggatctggattgaatagtcatcatcaattactaaaatctgaaacataataaatcgtgtatacaattaatattatacccaggaatacaaattaaaatacaagatgaaagtgataaacaaatggttagtagtatgatgtctcaaaactactaactttggttttaaaaaatcatttttaatgatccatttacttattacttaggggttgctgagaaagtctttccgtgagggcataggagtcaggagtcaggagtcaggagtcaggagtcaggaggagatttgaaaatttctttgccatctcttgaaatcccaaaaaatgcacactttctccggtatacccttcaaaacccttgcactaatttctgtgtttatcagcctctaacctttgatatatcaaggttttaggtttattcagcaaaccctacttactaagattctgatatcatcacatacagcatatttcagttaatagcagtacagaattgaaatcaaagtaagtattaatcgttgtgtattcctgactcctggggtattatgaagatgccagaggattgagccataacagcatgactttttttaactggtgtatatcacgatatacttcttgtttaaaccattgtcctaaagcatcaagaggagtaaaagaatttccagcttgccaattaatatcttgacctaatggtgtggtatgatttcctggtaaggtttgtactgtcaccatttctggaaaacgtttttgtaatatttttgttaaaattactgattgatcaagattatcattgctaaatttgattaaaaaattacggcgaatttgataactttcttctacaagttggttagtttctaagggtgtgggagtaaactcaatcgccaaagtagaatttaattgttctactagaggaatggcatctttagcagtgtaattgttaaatgatatgagaatattacctgccctttctactgggaaaagactaccaatcagtaaatgcagtttgcaacccatactgtgtccaataccataaattggtaggtacagcttgcgtaattcaccggaatagtgtaatcgttctagagtgcgttcaaagttcagcagtacagattcggcgatcgcctgatgatctaaggtgttgacaaaaggtgtagcaaccaccacataacctttagctgccaactgttctagtaaccagcggtaagtcaggtggggtgcggtagcgacaaatgcaccccccaaaaaatggatgatcccgatgggatgacggggaataattacccagttgcctctaatttctttccagtccatatcaatgtgcaatacctacgctaaatccacgctgccgcgtgcttcatattctttaatattactctgttcctgccagagaagattaacaaaatttttgcaagggagtaatctgctggaaataagctgttggacatttaacttccatattatctaaaattaaaactcttgtggggtgggcatcctgcccgccctggttgtgtaaattaaaggtttaagctgttgtgcatttaatttgtataagtggaacaggcatcttgcctgttaaacaagagttcagaacattagggttatacaatttagctgtgtaacagcttatcagcttagaaataagtacccaggcaaaattaatttaacatattgatagaaaacaaaaatgtctatattcctgatctgttccctctcctaactataaaatttattttgcccaactacttattttttgatttggaagttttttaaccctgctcctgtaaccttcgcatttcatattgcacatctaaagcaatctgcaatgcttcatttaataatcgtccatgttctgttgcttgttcagtcacttggatagcagttaaagcagctaaattactagcaaataaatcagcattactcaggatgaaattcttattttctcgcaaaattctttctgtcttcaaagcacgtactaaatctaatttagtgaaatttaaagcttgaataactcgttctctgtgcgtgatacctacctctggattacctgcttcttctatttgatcattaatatatatagctttaatcactgcattatatctttccacatcattaagtaaattttgcaaagaattagtcatattttttttgagtaatttgcttttactcctccaaagaaaatataagatagtttggcttaaacccccactccagacactaaataaaattagtaatatccaagagggaatggtaatccaactggcaaatattttgatcataacatcaaataccagatatgaaaaaaccaaagttgaacaaccgataaaaattaccgtagctccttcagaacctttgatttttgcgattaacattttttgccaatgattgagataattagtaatgataaacaactcattatgaacaggtaaattagtcaatttttccaactcttgatgactaatttccaaacctcttaaatcatcacgcacagctttcccaacctcatggaaatagtaatttactctaatatagcaatgaaaattccgaaatggtaagtgaaatgatatagcaggaaaaggaataagcattcagccgtcagctatcagctattagcaaaactcaccaaaaatataaatattagcctgtgaattttgccgaatcatgatttctgaataagcgtgaataaataaaaacccgaaaaaatcaaaataaatataatagtagtagcataaactatgacatctttgagaataaataatatccaatctttcctcagttcttgtttaaatttcagttcccttaacttgcgttcaagttccacatcttctttagtagatatattcatcaaactactggtatctacatcatcaagtatttctgctggaaagcgtgttgctgctggagttgcaaaagtttccaaaaaattgtttaattgctgatttacctcagttgtcacaattggtagactatactgattgagcttcctgagttcttttttgatcagctttttcacaattttaactattaatgcttctaaagcttctaaatttttatccgccatctgattgaaaattaaatattttctaggtaagtattcagcattcagtaatcagtaataagctattatttaggatttatgagtattgttaacgaggaattaggaattaaaaatccttgcaaattagcctcaagagcagttttagctgactgctgagtgctgatagctgaatgcttacttttctagtatcacctttaaagtgtagtttaactgaatgtcaaacaactgaagttagggctacagtgagagcaaaaaggtaaaaatggtgattatggttattatagttgtcctgattaatatcatgatctcaataatgctgctttacatagctcgattgctatggcaacttaaacacaagctaggaatcatagcagacaggttaaacagctatgaacacgctctccataccgtattatatacagcaccagcaaatatttatacaggacaacagcaaatttatgaattatggcaaaaacaccaaaacctgaaattgcaaattcaacaggtgcaacaaattcttaacctcgtattactagggagaaacatttggcagaggtataaaaagtataaattataaacttcaccgtgagtttcgacagcttcaactactgcttgctccatgactccctattgccagaacatcaaaccagcataaaatgagtgtaatggatataaaagattaaccataaaaatgtctaataatcgttcgggaatatttataggcggtatgatgctaggagctaccattggtgctttagcaggattactcgctgcaccccgcccggggagagaaacgcggaaacttttgaaaaaatcagcagatgccttaccagagttggcagaagatatatcaaccagcgtacagattcaagctgatcgactttctgccactgcattgcaaaactgggatgataccctagagagactacgggaagcgatcgcagccggagtagaagccacacaacgcgaaagccaagccctaaacaggccaaaccctgctgaacctaaaaacactgattctctcacccagaatctataacgctcacaaatagcataaccgtgattcaccctctgttttggctgggactgtctatactcttagtcgctgctagtctcaccgctgttttagtagcggccatacccgctgtgcaggagttagcacgcgcagcccgtagtgccgaaaaattttttgataccctctcaagagagttaccccccactctcaaagccattcgtaataccagtttagaaataacagacttaaccgatgatgtgagtgaaggtgtcaaaagtgccggtcaagtcgtgaaacaagtagatcaaagtttgaatagtgccaaaaaacaagctcaaaatattcaagtcagcacacgcagcctcgtagttggtgttaaagcagcctggaaaaccttcacacgccaaaaacctgccagacgtaaccccgaacgcttatccattcctgacaaaccagagttaactttgccagagcgagaattgctaagttcggaaaatagaagaatagttgataggtgactggggactggtgactggtgactggtgactggtgactggtgactggtgactgggcattgggcattgggcattgggcattgggcattgggttattaacttccccctgcttcctgctcccctgcctccttcctgcctccttcctgcctcctgacaactgaccttaaattagagtaaagtaaacaagtgtaaagaagtatcacttttctcgtaatctttaaaaagcacttgtttacctttgcccttaatatttgtataaaaaattccatgcagcgttgtttttggcgaaaaattttagtatccattgcagtattttgctttgctgggtcaatttgggcgattcattcaccatcagccttagcttatgaaaatcctgacttactaccggacacatttaccccagttgtcgatttagcaaagactctcccagacccccaagaagaaaaacttgtcaaagacttagaacaatttgaaacggatacaggctggaaattgcgagtattaacccagtatgaccgcaccccaggcagggcagtgatcaaatattggggtttggatgacaaaagcattcttttagttgcagatgctcgcggtggtaatattcttagttttagtgtgggtgatgcggtttatgaacttttaccccgcacattttggattgaactacaaacccggtttggtaacttgtactttgtcagggaaaacggcgaagatcaagcaattctacaggctttagattcagtaaaaggttgtttactcaaaggtggttgtaacgtcgttcctggactaccaagagaacaatggatactcaccctgattacatcagctattggtggtgtgatttgtggctttgcggctcaaccccgcgatgataaacaagtctttgcttggcagtgggcgttaattttttcacctttgtggggaattttgtttattgccttcggtattgccccagttattacccgtaccagcgattggattcctctagttcgtaatatttccgcttttttaataggtctgttagtcgcctatctctctcctgttttcagtcgtccttcttccagtgctgagtcttgagtgactagggactggggactggtgactggtgactggggactggtgactggggactggtgactggtgactggggactggtgactggggactggtgactggggaagatttttaaatattaccaattaccaattaccaattaccaattaccaattaccaattaccaattaccaattccctcccttgtgatgataagctgaaagctgatctgtgagaagcttaacggcaatggaatggcacgtaactgatgctcaaagcttggcaattattgatagtgaaattggcgatcatgtcttttcaccagcggaatatgaaatagtccggcgagtaatatacgccacctctgattttgagtaccagtctttgattcgtttttcggaacacgctttacaagcaggagcagccgcactggcagcacgtactaccattgtggtagatgtgccaatggtacaggtaggtattgcctacgatattcaaaatacctttgccaacccggtgtattgcagtatggaggctttaacccgtccccaaaaagaaagaactcgctcggcttgggggattgaaactctagccaagcgttatccagagggaatttttgtagttggtcaagctcaaactgccctcactacattggtagatttaattgaagcggaagaaattcgaccggctttgattattgctactccagcaggttttattaatgtaactgctgataaagaacgtttacaggattctttagtaccttatattactattgacagtcgtaaaggtaatgcggtggtagcatctgctattgttgatggtttggttgatttagcttggcaagcttatggtcaagatagaactggggtaagttagatgataagtgtggtgatggagttattaacttccccctgctccctgccccctgctccctgcctcctaataatcatcatctccatatctttgtggttctggacgacgacggcgacggggtttttcttgttggttttctcgtaagcgagcactaacttcattgaagaaatcttctcgcacgtacggatagtcactcacccataaattacgactgggaatgtagatattactaaattcctcgattatgcttaaatctgggcgatttgacatgaataccatttctgcgatttgaccacgagtgattgctttgtgtgcaggacgtaatggggcatcaaattcgatactaaatcctgtatcgtcgcccacttctaaattaattcttttttcgcgattttcaataattactaactcgcctttgttattgactgtttcttgtttgccaattaatttttctgtaatccaccaatctattacccgcccccgaaaaaagccgctatacttgtaactccgacattttgcattgcgaatactagcttgaaatacgggataccataaccaaaaaaatgccccaaataccccaaagacaaaaatcaaaccaaaatctagtttcaaaaagatccttagcaggaaaattacaactactgtgactacagaaattaataatctttgtaaaaagttgttgaattttccccagtagtatttgtactgtgaaccactggcaataagaggaataatttgttcaaatttttggcgagtcagtggaacaagcatattaattaattgataattgacaattgataattgataattgtttgattccagttctaaaacatccccttttagattttagattttagattttggattttcacaaatataggactatacagggtgatcaggatatcaatatatttctagaaatgagactaaacagtaatttcgctcctgactcctgactcctgactcctgactcctgactcctgactcctgttttacagaatcttttctaatccatatactaatgattttaactggttaattttgcgaattgctagtaaaactccaggcatataacaggagcgatcgcttgtatcatggcgtagggtgtaaatttgtcctgctgcaccaaaaattacttcttgatgggcaatgagtccaggtaggcgtacactatgaattctaatcccttcatcaactaaagatcctctggctcctggtattttttctgtttctgtgacttggggagggttaaaagttttacccatttccgctaataactgcgctgtctgaatggctgtaccgcttggtgcgtcggctttttggttgtgatgcagttcgataatttctacatgatcaaagtattgggatgcggtgactgcggcttgttgtagcagtaccataccgatggaaaagttaggaataattaaacaacctgtactggctttttcggcaaagtcggctaagtttttgagttgttcgggacttaaaccggttgtacccactacgggacgaataccataggcgatcgcactgcgaacgttatcatacactgcatctggatgggtaaagtctaccatcacccctggttgtagctgtctttctcctgctacatagcctaacattggctctaattgattggttattggcacttctaagggttcgcttaaacctgccaattctcctgcgtcttttccctgatgttctggtgaggtatcgagagcgcccattaatgtcatatcaggtgcttgggctactgctttgattacttcgcgtcccattttgccagcagcaccgttgacaatgactgggatagtagattgattggtcatgtttctagaaatacgtttttagttattttacctatagagcagggaacagggaacagggaacagaaagcaaaaggcagagggcaagaggcaaaagttaatattctacccttgcacccctgctttcttcagtgtcacctgtcacctgtcacttgctttctgcctttaggaaacttttaataaatagctcatacagtgtcccattaaaaagtagactactaacattgcggccgctgcgagagcaaccaatgtacccgccaacatgagggaaaattctttgttttcgtaggctttctccatcaggtgcagcgaccaggcaaccagcgccacatcaaaaagtaaaataggaatcaacatatttcttaatatttcttaatactagtaaactaatattaacattgttttcggtaactgtgtctagccgaagagagatggaattggttgctggggctgggatcaacaaggcaagcggactggaacagatcgttcctgcaaataatttttaatttgggctacgcttaattgtccataatgtaaaagagatgctaataaagcggcttcagcttgacctgctgttaaagcgtcatggatatgctgacaatttcctgcaccaccagaggcaataacgggaatttgcacagattcggcgatcgctcgcgttaactccaagtcatatccagcttgagtgccatctgcatccatacttgtcaccaacaattcaccagccccccttttttccacttcctgcgcccaccgtaaggcatctattccagtattttccctaccaccacgcacgtaaacatcccaaccaaggttattggggtctactcttttgcgggcatcaatagccacaactatgcactgattaccaaagcgatcgctcgcttcattgatcagatttgggttgcggacggccgcagaattaatactaaccttatcagccccggctcgtaacaaacctttaacattttctaaggtttggattccaccccccacagtcagcggaataaagacctgttcagcagtccggtaaaccacatcaataatcgtgtcccggtcttcatgagtagctgtaatatccagaaacactaactcatcagcaccggcttcgttataaactttggctagttctactggatcacccgcgtccttgaggtctacaaagttaactcctttaacaactcgtcccgccttgacatctaaacaaggtaaaattcttttagataacatagtgatttctctatctttggtaattgttcggaatttaaattgtaaaggtaattggggaattaggtgacaggaggcaggggagcagggagcagggggaagttaataacccaatgcccagtcaccagtcactagtccccagtccccagcgatgcactgagcttgtcgaagtgtccccaatcaccaatcaccaatcaccaatcaccaatccccagtccctaagttaagatagctgaattatgaccataatctcctcaaaaaaacagcctccagaacccaacggacagccacaacagcgcagcgagtcgcctaaagcttctacccaaaaagcgcctccccaggaaaatatactgcaaccggaagcgactgttgaggaagaaggtaagcaggaagagagtattcgcccccaacgttttgcagattacattgggcagaaagatttaaaggatgtattagagattgccattaaagcagctaaatctaggggtgaagtgatggatcacctgttgctgtatggtccgcccggtttgggtaaaaccacaatggcgatgattttagctgcggaaatgggggtaaattataaaattactagcgcccctgctttagaacgaccaagggatatagtcggtatattggtaaatctcaaaccgggtgatgtgctgtttattgatgaaatccatcggctttcccggatgacggaagaaattttgtatccagcaatggaagattatcgcttagatattaccgttggtaaaggttcgagtgccagaaccagaagtatacctttatctaaatttaccctagtgggagcgacaacccgcgttggtgcgttaacttcaccgttgcgcgatcgctttggtttaatccaaaaattgcgattttatgaagttgacgaactcagtaaaattgtcctccgcagtgcagaattattacaaactcctgttaacactgaaggcgctacagaaatcgccaaacgttcacggggaacaccaagaattgctaatagattactaaagcgagtccgtgattacgcggaagtaaaatcatttacagaaattgaccaaccgattgcagcggaagcattacaactattccaagttgatccttgtgggttagattggacagatagaaaaatgttaagcgtgatcattgaaaactttaatggtggtccagtggggatagagactttagccgcagcgacaggagaagacacccaaaccatagaagaagtttatgaaccctatttaatgcaaattggctatttaagccggactcctcgcggtagagtagccacaaaagctgcatatcaacacatgggttttaaaccacctaataatgagcagttatctttgctttgatcaaaaaaaatgggataagctgttgtgcatttaatttgtataagtggaacaggcatcttgcctgttccacaagagttcagaatattaggattatacaatttagctgtgtaacagcttacaaacccgcccttgtagggcggctttatttgtctattgttaatttgggttggctgaaaaattcttttcgtgggggtagaagaggcaatggttcgacttagctcaccaagaatgactgagtattttttctgaatagtagcaaatgattgacatccattctcaattgctctaatttaaattgaaaagtgcgatcagctacacttgctaaaatagtcaagaaattttatctaaaggcttgaaaatcggacatggacatcaaaaatctgtttacagcaggtggtgtagtgatgtggccgctactgctatcttctgtagtggcactggggttaattattgaacggatcaaattttgggtcaaaattagcaaccgtcagcaccgagtagtcagagaagtattgagtctgtatcgtcaaaacaatgtggttagtaccattgatacattgaggaagaatgtagatttgccgatttcccggatctttttgacagctttggaactagaagaagcaaacccagaagagtttcgtttggctttggaaagtgaagctcaggcagaaatacctttgctcaaaagatttaacacggtttttgatactattattgcccttgcacctctgttaggattactgggaactgtactgggtttaattacttcctttgcatctttgaatattgggaatgtgggaggatcacaaactgcaaatgtcacaggtggtattagtgaagctttggtttctactgctacaggtttaattgtggcaatttttacacttttgttttctaacacattccggggactttatcaacggcaaatagctttgattcaagaatatggtggagagttagaactgttatatcgtcgtcgctacgaaagaggagaaaaaacctatgcgcctacaagatgatccagatatccctgcacagattaatattgtgccgatgattgatgtgatatttgcgattttgacattttttattatgtcaactttatatcttactcgttccgaaggtttaccagtaaatttaccacaagcagcaacagcaaaaagagataatcctgcacaggtgacgctcacaataaataatacaggtcagatttttttgaataaagaagctgttagtttagagcagttagcagatcaggtgagagcaaaagcagaacctcaaaaacctttaatggtaatacttaatgcagatgaagctgtgaatcacgggcaagtggtagctgtgatggataaagtgcgacaggtagaaggtgtgaaattaggtattgctactcgtaaataattaaggattcaaatgattaaattaatctgtattttcctgagtttattactgacctttggtttttgtacaccagcgatcgcacaaacccaaagtattaccgcagaagagctacaattaggggatgagttagcaaataaagcctttacagctacaaatcaaggtgattttacaacagcggaaaaatattggacagaaattctggaaaaattccctactaatcctgcaatatggagtaatcgcggtaattcgcgggtaagtcagaataaattacaggctgcactagaagattataacaaagccattgaattagcacctaatgtaactgatccttatttaaatcgcggtgcagcattggaaggtttgggaagatgggaagaggcgatcgctgattataatcatgttttggaattagatccaaacgatgcaatggcctataataatcgtggtaatgccacagcaggtttagggaaatgggaagaggcgatcgccgactatcaaaaagctacagaaatagctcccaattttgcttttgctcgtgctaattatgccctagctttgtatgaaacaggtgaaataaatacagctatccgagaaatgcggaatatagtccgtaaatatcctaaatttgccgatatgcgtgctgctttaaccgctgcttattgggtaggtggtaacaaaggagaagctgaaagtaattgggtagcagcttatggactagatacacggtataaagatattaattgggtaacaaatattcgccgttggcctcctagtttgatagcagcattaggtaaatttttgaaattacagtagtacagtaatgatgatggcgatcgctgggaaaaaaaagagcgatcgccccaaaaattacctaaaattaacatctttcaatttccacaaatttaaacctaaaaccattttcctgtaatttttcttctttggttaatttgccaaagttgctaaattcaggaaaatatatatcacccgcaaaactcccttccacaattgtcaaatatagcttattagcaaattccatagcctgagtataaatttgttctccaccagcaataaatatctcttctgtttcactcattttactccattgaattgcctcagacagtgaatgaaaaacaagacagccaggagcttgataattagtatctctggtgacaattatattagtacgatttggcaaggggtgattaaaagtagcataggttttacgacccataattacaggatgtcgccaggtaatttctttaaaataacgtacatcactgggaatattccaaggaatacccccacgaatgtgttcttttttggaatcagctaaaatacgatcttcggaaatagcagctatgagactaataagaggcataattcataaatatccttattcttgaacagacaataattattttatttttaatatagtgatgtttttgctcactaaacataagttttataaagttttcaaattagtaacaggattttttatagaaaatagctatatttttgacttgtggtgctgttttctggtataaaacattgtaatttaccaaaaaactataacatgactcattacggcttaatttgcccagcatccactggtcattggaacaccatgttaccattaggcaaagaattacaacaacgtggccaccgtgttaccctgataggtgttcctgatgcacaacccaaagcacaagcagcagggttagaatttcaagtcatgggtgaaacagaatgtcccccaggttcaacagcagaagctttggctaaattaggtgaattaagtggacaggaagcactaaaatacacaatcaaactctttaaagaacaaatcaacatcaaactcagagacatccccaaaattgtcaaagatgcaggtatagaagcactactaatagatcagacttttgcagaaggtggtactattgctgaaatttgtcggatgccttttattactatttgtagtgcagtagttttaaatcgagaacccagcgttcccccatttataacaaattggaattataacccaacatggtggggaatactgcgtaataaattagtttataaattattaaataaagcaactcaaccgattacagaattaatagatagctatcgtcaagaaaacaatttacctgcatactctcaagttaataatcgttattctccattagcacaaataagtcaacaaccagcagaattagaatttccccgcaaagatttaccccagtggtttcacttcacaggaccctatcataattctacaggtcgggaaattcctgattttccctttgataaattaaccggacaacctttaatttatgcctcactgggaactctgcaaaatcgcctattaccagtttttaaaactattgccgaagcttgcaaagatttagatgcccaattagtaatttccttgggtggttcggctgatcctcaagttttacaaggactaccaggaaatcccttagtagtgcgttatgcaccacagttacaactattagaaaaagccaatctcaccattacccatgcaggattaaatactacattggaatgtttaacaaatggtgtaccaatggtagcaattcccattgctaatgatcaaccaggagtagcttcccggatagtttggtcaggatgtggggaagctgttcctgtgaacaaagtgaatgtgaataatttgcggaaagcgattacaaaagtcctcacggaagaatcttataaaaagaatgctttgaggttgcaagcagcgattcagaaagcaggtggagtgaagcgagcagttgatattgtagaacaggctatttctactggtaagcctgttttgaagtagaaaatttaattgatcatagtgcttgttgaacaacaaaaaatcaactccaagaatttatgaaatcaatcactagaaaactgggtttagttgaaaaatggatggaactaagccacgagttagggggtggaataattgtaaatatcgcagaaatagaaggaaagttaaaacctgaaattgttcaacaagcacttaaattagttcaacaacgtcatgccatgctgcaagtttatattgtagaaactgaaaatgggatgtatttccaatctgaggggataacagaaattcccttacaagttatctatcaacaatatgaaaacgaagcattaaaaatagcagaaaaagaactacatacaaaatttcctccaggtaaaactcctctttgtcgtctcactctgttgtattttccagaaaatcaaactacctgtcaaatgattatcacattccatcatggaattgttgatggtctatcttgtatgcagtttattaatgatttactgctttattctcaaaaaattgcagatggtgaaaatataccacagatagaatcattggaattaatgccagctatagaaaacctagttaattatgacctcattcaagaaacagaaattacaaaaacttcagtgaatgaacaaataaacctcgaaccacaattaattattgaaggtaaagcatctgcaaatgaacggtttagtaaaatcttgccacgaaacctgagtcaagatataactaagatgctaattagcaaatgtaaacaagaggaaaccactgttcatggtgctatttgtgcagccatgttatttgcttttacaaacttattaagtcccaatgaacagataaatttagcttacgggttgcctgtaaatttaagaaaatattgtcaacctgagattaatcatcaaaatttaggttgttttatttctgtcttaggatttaatcaattagttgataaaaatacatctttttgggatttagccagaaaatgtaaatcaaaaatacataattctttgattagtggtataccattaaatttgctaaaacaaaacagatttcgcagtttggctagggaattgatgggtcaatctgtcattagcaaagaggaacaaatgggaagaaacaatgctttttccatttccaatagaggtaaattccaagttggatataaacaagacaaaataaaaatcaaagacttatattttgctacaggtcaacatcttggtggtgattgtttttggttgggagttgtcacattaaatgatcagatatttttcagctttgtttatgtagatcctgttatcagtgatcagacagcaaataaatttgccgatgatgttattcatatcctgcataattcatgtaccaataattttctacttaattaaatgtcgccaattccaaattctaaattacatttttggttgcactttataatattatattattaacatctttttgggaaaaatcaaacaatatggactgggacaataactcaatagtaatttattccaattttccctttcatctagaagagtggtctcctatttcaattaataaaggtataggaggaagtgaagaagcgataatttatttaagtcaagaattaataaaattaggttatcaagtcacagtctttaacagatgcggtgacatggaaggagaatataacggagtagtttatcaatctgttgataaattcaacccagaagataattttaatgtcttcatttgtcatcgtgcttggactcaaccaatgcaaatgaaaattaaggctaaaaaaactgccgtatggatgcacgataacccgaaattatttcctgagattgaagaatcgcaacgtgcagcatttctcgaaagttttgataagctgtttatgctatccaactttcataaagcaatgttaccagattggataccagaagataaaatatttttcacaaccaatggtattaatttagaggatttcaatttaacagaaattacaagaaatcctaaaagattaatttcaattagtgattatacaagaggaattgaacatctacttactcaatgggataaagtattaaaagaagttcctgacgcagaacttcatcttttctatggttggcaaggagtggatgcactaattaattcaccctatattcagagatttcctcaattaccagataaaaagaaaaaaataatggaattattcaaccagaaaaacgtttatgaacatgacagaattggacatcaacaactaatcaaggaattatttcaatcgggtatttgggtttatccttgtcatacaccagaaaccttttgtataagtgcttggaaagcgcaagctgctggttgtgttcctgtggtgacaacttttgcaggtttaaatgaaactgtgaaatcaggaattagaatacctagacctgcgggaaatgaggaaactaacaatacttttgtagaagcagtaatagacttattaaaaaatcccgaaaaacaggaaactctcagacaggaagcgttatctttgaaagattcctttggttgggataaagtcgctaaacaatggcatgaggaatttattttagcttaaatacattaggtgcgttagcatagcttctcgcacctgaaaaaccctatttcacactactttgtaaatatttcccacccccaaatttcctccggtgtcaattcctgcacattactaaatactacctttgcacctgctttaatcaaagtctcagtataagcttcttgacgttctaccgttccctgaacatgaggtggtaaaactcccacacccacccatgtgcgggaattatctaaacttctagcttttgtcacagtgtgcatatctgcaactgtatcacccacataaatcacagtttgctttttctcagcaccattttctaataaatttatcgttgcaaacagtcccgtcggatcaggtttaccaggtgcatcttccatcgcaattaaaaccggagatgttaaacccaaacgtctttctaaaatatagttagcagaaccgcgagtagcaccgctaaaaaatccccaatcaataccagcttgtgttagtgcttctaaataactagcttgtaacaataaaggttcatcacaaatataaccattccaattttctggatctgttccgcgataacgagattgaaaatagacaactatatcttcataatttaatgctaattcttctctattttttccctgactcacaaagtaacggtaaattaattcttgagaaccttcccaatcattattccaaattccctcagatttgagattatcaatatctacatctgtgggacgatagacttgatgagtaaaatgctctacagtatctgctaaagcgcgacgataagaaccgctaacatcacgaattacaccatcaatatcgaaaacgatcattatattggtttgtttagtcatagtcacaggtaatagctgttttttagagtttagacccaattcaccatagattttaatagattcagaggtatgagacaaaaaaatttttgcctttgaagtctgtaactggagaagatatcagtggggagcattgctgtctgtatcaggactttcacccacaaatttcagattagctataggatggtatgagtggggatcaccaaggtttatcctcctgtagctagagaaaaggttaaaactttatgccgtaaattccagcagtctaagtacaacaaaatctgtattcttgtcaggactagacatagggggtacaacccctggtatcatagttgaacaggaataaaaattacacaattacggaggtgcatctctatgcttagaggtaacacgaaaaaacaattaacctattctcctcaaagtcaattagcctattttcataggaaaaaacttagctattacccggacaaacaatacacctattaccctcaaaaaaaagtcagctattacccggacaaaaaatacacctattaccatttaattgctgtatttataaccgggttgataggaggattgacaatcaataatctttatcacaattatcattaccaaagtgtacttgattcaccatctttagagtcagcaaaagcaaaaaaaccagccgttgtcaaagttactgctcacattatcacaatagacaaacaaacagccttcaattctgtctggaatctgccacaagtacaacgcaaagccaaagagattgaaagtctttctcaaggcagtattcgtttgtccgcacttgttgaaagttctcctactaccgatagacctttttatatagtgagagtgtttgaaaatcatccagataaaactaccagtccggtttattggtttaaagtttccagttctactggtgtcatccaacctttagatttggtgcagaacgaatacatagctctggaaaaatggaatcctgatggacggtaatagtttaagcttggtcatgtcttaaataacgaatcggtaatccttttgatttttctctagtctctactccttgcattttgttttttttaactactttaatcaaacaaattttgaccagaaaaatatcttaaataggattttggacttgttgttgacttaagtcaatggagaaaggtgaagggcaaaattgtcttaacgaaggcagaaggcaagaagcagtatcttattctccccaatcaccaatcacctcttccccaatcaccaattctattttttcacaactttgagacgctgagtaatcattgtcatgccatcattacgcaggatgaccgcagaaatccattgttgtccaggggtagatggtgcagttccggttttaaataatcctccagcagagagtaattctaaatttactggtgtggggttgagatatttgctgggttggatggtttcttccatagcacttcccaataggaaatcattacctaatggttcttggacaatagcatcaaagctatatttctgaccaacttttacctgttgtggtaatttaatttctacttggggtggtttgttgccggaggtaagctgggtgcgttcggataaaatctcttggtgcagaatttttgtacctgcaatgcgctgacgggatgtaatggtagcattgagagctagattattacggttagaagatggtaaacctgtgattgtggtgactgtttctgcaatgatggttttgccttctgatttccaagattttagtctagtgctgtatcgtagttgaggatatcgctgccagaaagattttaaagcttgttccattgtttggcggtttaatccatcgccatgagtgaatttggggctgtaaaattgcattacgcctttaatatcaccccgactagaggctgtgtcaatttgtgtgaggaggttttttagtgctgggggtgcattttccggttgagcagcttgagcaatttgcccattactggttaaattcagtgtcagtaggcaggacaacagggaaatactgccagttaatgttttgttgtggttcattaataaagcaataatattagtcattgattatagtttactgatttactcacagaaggtcaggaatttacagcaggagtcaggagtcttaggggcgaagtaggggcgaagcattcaggcgataaattatcaattttatgaaaaggttatcttccgaatgctttgcccttacaggagtcaggagtcaggagtaaaactctatttatgtctaggttgcaactgagattctgtacctcatggagatgtaatctgctgtatttatcaacaaccgcataaagtaaaatgtttggcgctaccttgattgtaatggatatgttaaaaggaaggcggtttcattgttaaatggttgtcagtagtggtgacagctatcactatgctaactaatcaaggtttttgcagttttgttaattcggatgacttcgagtaaattaattgcataaccatgatatatttcgatggttttaggaaatataggtttcaatgccaaacgcacggttaaaattactcatagctgctagtgggactggtggacatttgtttccggcgatcgcattagctgataaattacaagaatatgaaattgaatggcttggtgtccccaatagactggaaactcagcttgtacctagccaatatcctttgcataccattgctgtggaagggtttcaacaaggtttaagtcttgcctctgtgggtatcctgtttaaactcattggtggaattttgcaggtgagacgcattcttaaacaaggaaatttccacggattatttactactggcggttatattgctggtcctgcggtgattgcggctcgttctttgggtttacctgtggtttttcatgaatctaatgctttacctggtaaggtgacacgattttttggaccttggtgcagtgcggtggctgtgggttttgatgtagctgctaagtatttgcctggtgtgagaactgtctgtgtgggtactccagtgcgatcgcaatttttggctcaggaaattgcagaaaatttagatttacctatccctgatggtgcgcctttaattgtggtttttggcggtagtcaaggtgcggtagcggtgaatcagttggtgcgccagtctgctccggcttggtttgatgctggtgcttatattgtacatttaacaggcgatcgcgatccagaggcggatagtttacaacatccccagtatatatcattaccattttacgataatatggcggctttgttacgacgggctaatttagctattagtcgttctggtgcggggagtttaaccgagttggcggtgtgtggtacaccagcaattttaattccttatccttttgcagcggaagatcatcaatcttttaatgcagcggtgtttactgaagttggtgcggcgttgagttttcagcagtctgagttgacaccagaaattttgcaaaagcaggttttagatttgttgcaatctccagcagatttagccaagatgggagagaaagcaaaagcgatcgcaactcccgatagtgctgataagttggctgctttggtgcgggaaatgttatttaataattgacaattgagaattgtcaattatcaattgataaaaagttgattaaatttaacgggagcatcccaaatgtgtaagtttattttttttgatttaaccgcaaaggacacaaagtacacaaaggtaagagggtttcagagagtttttggtgtagcggcggttattttttcaaaattgggatgctgccaatttaaccagctatgacattgacatccaggaaattttcaatcaaagcataaacatcactacggctgagtttttctttaccattggctaacgcctccagtgtaccgtgagctaaggccaaaggaatttgacagaattgcaaagcaggtcctggcgggagagagttagtataactatcagctaaggccagattacgacgtgcgtatttttgtagatgttcgtgatgccaaccttctgggaaaaagtctacaccacgggttaaatcttcagcattattacgtaaaatatttacagcttgtaaacctctaccaaaagcgatcgcctgagtacggttagtttctgtaccatcgtaccatgaccataaatctgagagtaacaagcccaccgcacctgccaccccaaatgtgtaacgatctaaatcagattcggtggcaattttccaatttctttctgcccaaaaagccatcctatcagccattgctgctgttgcatcccaaatgcgaggggcaatactttcaggtgctagtattgaccattctctcacccgtagactcacttctgctaaggaattttcgtaacctttaaatcctacagcaaaagcatctaccgcaaaaccatcaactccagcttgcaatgtttggctaatgttgcgtaacagatgcgctttggtagcattatctaattctggatgatcttcaatttcatcaatggcacgcatacacaaatatgctgaggccacagcttcttgcaaacctgacggtaaaatactgatgggtatataaaaagttctactggtttctttgaggatttgcaaggcatcttggcgtaaatccattatttcactcctctgttgattttcacaccataccggaattttagattttttgatgatactggatttagtttctactcccaaatctaaaaaactatctcgtatttcatcgaaaaattagtagtttatggtatcgcaattaacaaaaatctcaaatctatgaaattctagtctagtatatagggttttgggaataaacacctgatgtttttctgggtaatttatgtttatttcagtaataaaaattactgaattttataattaatatttaagtcagcaatcaaaaaccatacaaatcgtatttaaacatacatttttcctcactggagatatgtcaatatctaccaacttagatggtaaaaatttggtagcattgccaatactccacggagtgttaattattatgaaagaaaatttctcaaaaacacttttttccgtgaaaagaagacgattaatgatactaattgctatagcattaaccacaatgctgatagcaattggtataccaacccttacttccgcccctgtagtagcacagtctaataccaacttactggtatctgccgctgcaagtttacaagaggctctagaagaaattaagcccctataccaacaaaccaaccccaacatcaacattacttacaactttggtagctctggtgctttacagcaacaaatagaacaaggtgcgccagtggatgtttttatatctgcggcaaaaagacaggtagatgctttagaacaaaaaaatcttttacttcctggtagtcgtaccatcattgctaaaaatcgcctagttttagttgtaccaggtaatatttctggtattagtagtttttacaatctcaaagatacaagagtcaaaaaagtagctattggtgaacctagaagcgtacccgcagggcaatatgcacaacaagtattacagaaattgaaaatttgggatcatatcaaatcaaaactggtttttgctaacaatgtgcgtcaagttttatcatttgtagaaagtggcaatgctgatgcgggtttagtgtattctactgatgccaaaatttctaataaagtcaaagttgtcgttgcggctgacgaaaaatatcattctccaattatttatcccttagccatactcaaacgcagtaaaaacgttgatacagctaagaatttttctcagtttttagctagtgataaagctaaagctgtattcaaaaaatatgggtttattatgccttaaatatcgctaaaattaaattcctgtatttctcaatcaaatcttgtggggtgggcatcttgcccggcctaattatttaaagtaaatgacatcattgatctttacttttaaagtacaggacttacgcaaaagggaacgaaagtaggggtaattcatgaattacccctacgcaagaataaggttttcagtcacatcttgcgtaagtcctattcacttttaaagtcaagaaaatccttaatcttcactaattctctcactaatgttgacgtttccaaataacttatttatccaaggactagcaataaaaattcctgctagtaccaacaaaaatacagaaattccaaaaatttggtcacggggaatttctaacacaccacgtaaaataatttctcttaacgcagaaacaatagtaatttctaccgcagcacctacagaaatactatgttcttgcagataatcaaccaaaagcctaaataattccacaagtatcaagataaacaaaatatcagatgttacttgccgcaaatctaatggatgcaaaaaggagataaacatatctcctaatctgatgagcatcacacaaaataaacctacgcaaagagaaataacaataacatcttgaaaaagttctaaattacggacaattctatctctcttaaaccaactatttacttctacaagtatgcgttttggcatagtcgctacagtatatttatttttatgggtggtaaaaagtaatcttaaattaaaatccaaatttacaatgtttatcgagagcattaataaacttttatgaattatttccgcccaactcaataagcagaaactaacagaaaatagctactaaagagattaatgatagcttagaagcttcttacagaactagcaaaattgagaaatactggagcgaatcatgaaaattacttatgactcagaagttgacgttttaaggattatctttagtaatgcagaaattgaagaaagtgatgaagaaaaaccaggaatcattttagactatgacgaagttggaaatattataggaattgaaataatagtttacacatcagataggattgctatatgcttataattggtaagtatcaaaaacctatcctgtagcagtgcatgagctactgtatcaatcctagctgtcccaaaccacaaaaccccaaacaacccttattttgtcaagcttgtggttctgagttacttttagaggggtgttatcgagtcattcgtcctttgggtggtggtggtttcggtaaaacctatgaagtggaagactctggtgcaaagaaagttctcaaggttctgtttaatacagttcctaaagcggtggaactatttcagcaagaagcggaagtgttaaaacgactcaaccatcccggtattcctaaagttgaatcagatggttactttatttattctcctagagatgctaaagaacccctgcattgtttggtgatggaaaaaattgagggaatgaacttagaacaatacatgattcaacgtaaccatcaacccatcggtgaacgtgctgctgtaagatggttgaaacagatagttgaaattttacaacaggtccatcaacaaaattattttcatcgagatattaaaccacctaatattatgttacgccccaatgggcagttagtattaattgattttgggacagcacgggaagttacacaaactttcatgcagaaagtcgcaggacagcaagttacaggaattatttccgcaggttatacaccattggaacaaatgaatggtaaagctgttccgcaatcagatttttttgcattggggcggacttttgtttatttgttaactggtaagtctcctgataattttcatgaagatgcacgaagtggaaagctaatttggcgaaatcatgctgtgggtatttctccgggtgtaggagatttgattgattatttaatgtctccatttccgggaaatcgtccaaaagatacgcaggaaatcttaaattgtattagtgtaattgatggttctttgaaattggaaaattcagggaatgaagttcccagtagtaaccataaaacaagtaagttgaagtatggaagtttctggttgcgtttattagcttactgtacagacatttttcttttaactattactatatccctatggtggaaaatattttttaacttttttcctttgttaccagattatactattaattatgttggggcttttggatattctttaatacttacatcactaactacattaggaggagttttcggagaaatatttgctactatatttactatattatttattaactctttcactgatccgacagaacctttatttgcttttatcatacctacctttggttttattagcaaatggctatattttacttggtttgaaagttctcctatgcaagcaactttgggtaaaatgattttcggtcttaatgttaagaatatctctcagaagcgtttaacatttggtgaagctaatgtaagattttggagtaaaagtctttctggtttaattctactgataggtttcattatggctggttttactgagaaaaggcaaggtctacatgataaaatagctaaaactttggttattaaaaaacgatctccataattacacatcatttattttctgttcgttacactgtcactaacacactctactaaaatataactacaaccaccttatttgtgtaaaatataaaaggaggtaatgattatgccaaatctgacattaagcgatcaacaggtaattgaattagttaaacagctacccccagaaagtaaacgggtagtattgttagaattagctaaggatagtgaaaatgagcgtgagttgcggatggagtatgctgaaaaccaactccgcaacttgtgtgctgaaggaggtttaaattgggatactatgtcagaagatgaacgtgaatcatttatagatgatttggtgcatgaggatagacaatgcaaccaatagttgtatttgataaaaacattctctgaattattggttatttcctatctcttaaatatcataacccataatataatcatccatcacaaaaccaccaccaaaatctattaccttactctcaataatcttaaagccaaatcgagtataagctgtaattccttttacattacttttattaacattgagtataattttctgcaaattcatatctttagctttttgacaaacatgagataacattatttgtccataaccaaacccatgcagcgcaggtaataaataacatttatgtaatttcaaacaattaatatgattaagattatcttttacttccgcaccataagataaataaccaactatttgattatctttaacgactttatcgtaaaatattcctagctgataaatttctttttcaattatttcaagagcatacattttatctaacatatactctatttgttcaatactgataactccaggatagtgactacaccaaatttcccgactaactttgatcagttcctcaaaatcagtatctaataacttttcaattttgattgttaaattattcatatacggcaagttacaggaaacaggtgacaggtgacagtgtgaaaagtctttgggtgtgtaggtttgatcatcaagttatgtcctaagcgacttgtctgttgtgatatcaagtgagttttactcctgactcataactccttgatctcctgactcctgactcctgactcctaaattctgctatattttaaactttagtttctagcgggtgctgagaagtttgtaaagtttgcggtaaaccccaatctggacgcaatttagccgcttgacgcaaataaatgtggtgaacgggggcggaagttggcaaataggcgtgaattaaaaagcggatacaacgctgtaaactgccttcgacgtgcatttgttggacatccaacatagctacactatcccataaaggacgacggcgggcgatcgctgctgggaaaatagcatctaagtcacgggtgacagaaaaagtaacacttaaaatttctgttggttctagtttattccgtcgttccagttcattaattaattctgtcaccgcttctgtaattgcttctacgctattttcggcaacggttgttgcaccacgaattgcccgcatttgccattccacttccaaagtcctcctgaattagtcatgagttattagtcactagtcattagtcatcagtacacagactggtaactagtgactattgacaattaatctacggtctatataaccacaagggtaaaccacttgtagacatttcaaattccagccaatcaattccagccgcaatttgtgatttcgactgactactacctggtagaactcgactcaataatggtttacgttcttctagcgtataacaaggagttttttctggatcaagtccgactaattccgctgtccagcgtcgtgcatcttcttctgttcccaaacggtctacaacccctaattctaaggcttgttctccggtgaaaatgcgcccatcagcgaaatttttaactgtttctacctccaaggaacgagcctgtgctactgtctctacaaactgctgatagctgacatctatcaattcttgcaggatgttttcttctggttctgtcagttccctgtcaaaagataatatatctttataaggtccagacttgatcaccttaaaggaaacacctactttttctaacagacgttctaagttgtttccccgtaaaatcacgccgatactacctgtaattgtgcctgggttagccataatgtgttccgctcccatgccaatataaacgcctccagaagccgatatattgccaaaactcgctacgattttggtttttttgctcaatctcttcaaggcgctgtatatttcttgggaatctcctacagtacccccagggctatcaatacgcagcagtaaagcgggaaattttttctcttctactgtttttagggcttctaacactcgtttgcgggtagcactggcgatcgcaccagttatttcaatccgagcaatttgtttacgaaacttgggtttaaacggccagatcatgagtaatctaatcagttaatagatttaatataaattgtccagcggtcagatgacctcttcgactcttttcagaagattaaaccagcaagtatgaagctatttaaattttaaggaaatttttagatttggtttatagtgttgtttgctatatttcttaataaagggatatttctttaaatgttccattctcaaccaaactctgtactggtttgttgcgtgattgtcaaaaatcaccatttccaaaacacaatctaagttggtaacagtacagcaattatacggttgcttatacatatatattttttacagcacaatttaacagcataatgcaaagttattagtcacaagcgactaatgactaaaaaagcttacttacaaaaaatcacagcaataactgagctatgccaaaaaatagttaaagtcagggatagcagcagatttgtttataagaaagttaatttagttgttaattgtcattaaatcaaagagagacattatctaactttctgagttacttaggaatcaatacgcagtatttgataccgataataagcatagatatcaaaaagcccacccacaaaaccgaaagtaagactgataacaaataagccattgataggactaccagtaccaaaagtagccagaaaatgcaaaatctgagcgggtacttcttcagttagtccttgcaaaccggggacaaagccaaaaaggcataaacagattaatataccgcccaccaagaatatcggagcaataaaactgaaaacagtagtaagcaagaaagatcggagaaagttggtaaaaagattcataatcaggcaatctccaagagtaaggtgaatgatagccaagaagcagtacgttaatttctacaatacgtgcgatcgctcctgaaaagttaatttgtcaaaaatcttaagttttcattaaaagaaaagttaatataaccctcaagtgatgaggctatgttgatggcttccaaagggtaaaatacctgatatatcaagattttcgccgtttaataacgtcgtaatatatttaatcaagcaaaagaagcagcttaattttctgagagaatctttaaactaagttaatgtttggggattggggattggggactgggaaaaataactaatgactcatgactaatgaccaatgacaaaaaaccaataactttcgctattcttaaagcattcactgagttagatagaaaacattgagccagactatatccaaatccggtttaggtgcatggaccaagcgattactagcagcgatttttttaggtggacaagtgatagttcacctgatgaaaggcaaaatccatcgccgtaataccttagaacaactagccgccgtcggtccagattccctgtttatcgccttattgacggccgtttttgtaggtgcagtatttacaatacaggtagcacgggagtttatcaactttggcgcaggaaacttagttgggggagtattagcagtagccttaaccagagaactgacaccagtgctaacagcagtgattttagctgggcgagttggttctgcatttgccgctgaaattggcacaatgcgggttacagaacaaatagatgccctgttaatgttaaaaacagaccccattgattatttagttattccccgcatcctggcttgtttattaatgctgcctatcttaaccttgttatccttagttactggaatgggtgggggactaatagttgctatcaacatttacaacctctcagatacagtatttttagactcagcccgtaacttcttagaaatttgggatatctttagcgccatgattaaagcagcctgctttggcgttttaattgctattattggttgcagttggggtttaaccaccacaggaggagcaaaaggtgtgggacaatcaactacaacagctgttgttaccgccctgctgattatctttattagcaacttttttctatcatggttaatgtttcaaggaacaggtggaggattcactcctggactgtgatggtgactagtgattggtgactagtgactggtggttgggttagtaacctccctatctcccccgattccctgttccctgttccctgttccctccaactaaaattatgactacttcatcagtacctaacgccctatctacggtggaactcaagccaagttacaatatccctattgtgttggtgcttggttctattcccctactgctgttgcaaccttgggttggaggagcgatcgcactgctaggattatttttaatgttgcaagctgtaaccttgcgatttcaatttactgctactgattttgatctttaccggggtgaaaagttaattcggcgttttccttaccgagaatggcaaaactggcggattttctgggatagagttcccattttgttttactttaaagaaatcaacagcattcactttttaccgattttatttgaccccaagagcttaaaatcttgcttagaagaacgttgtcccagaatatgaatagtcaacggttggtagactgataactgataactatagcaggagtcaggagtccgtaggggcaaaccccccgtggttgcccgaaaaacgcccgtactacggctataatttagtcgcgttaataattacaatcctatttatgaacccagaggaatcccaaactccaaaaccgatagatgactggtgggaagaaacgccgaatgaaatttccacagatggaaaatcggcggaaatatcagcaaatttatcggatgattcaccattagagacagaaacatcaactccagcacaaccatcagcaaaggaagttgatgtagagtttgcaatgatgaacacaaaaacacaaacatcacaaacgtcaaaaacagtagaaacattagaaacattagaaacattagaaaaaatagataataaattcctggaatcagaatcagaatttaattcactatatgcagtagcagcgcaacgagtagctgagttacaggaaaccgaatccgcactcaaagcagaaatatctcaactgcaaattacttacaaaacccttcagggacaggttagcgaaactcaaacagcactctcgaaaatggtgcaagagtccctttcattgttagaacagcgtaaacaggcattgcaaatttctgtagaacaactggagcgacgacaagaacgcattagaaatgaaatgcgaacgacttttgcaggtacgtctcaagatttggctattcgggtacagggttttaaagattatctcacaggtagtttacaagatttggcagccgcagcggaacaattgcaacttgtgccggctgtgagggaaaaagaaagagaaaaaccagccataaaagaggcgaaaaaagaatccaaacctgttgaagaacagtctcagactttgcaatttgcccaacaacagtttcaagatacaacaaaacaaattcgccgtttaattgatcaatatcgcaaccagccagattattatggccctgcatggcagttaaggcgcacttttgaacctgttcacgctgaaagagtctctaactggttttttaccttaggaggacggggtgcgctgcggacgatgggtagtcgtttgcagaatattttgattgcttcagcggccatttcgattttacataaattatatggcgattacgcggagcgtagtgccgggggcgatcgcctacgtactctgattttagctaatagtcccgaacgtttgggcgaatggcgacggggtttacaagattgtttaggtattggtcgtcctgattttggaccagacagaggtgtggtattatttgaatcacctaacgctttagcccaaaaagcagatagattagttaaatctaatcaaatgccgttaattatcattgatgattctgaggagcaaattagtttaggcttattgcaatttcctttatggttagcttttgcaccagatccgaaaatgatgcgcgatcgagattttgatgatgatttttaattatagggaatggtgactggtgactggtgattggtgattggtgattggtgactggggaaaaaaattttagattttagattttagattttagattggagttaacaaaaacaatccaaaatccaaaatccaaaatccaaaataaataactcctgactcctgactcctgatagcgacttgtactgagcctgtcctgagcctgtcctgagcctgtcctgagcctgtcctgagcctgtcctgagcctgtcctgagcctgtcctgagcctgtcctgagcctgtcctgagcctgtcctgagcctgtcctgagcctgtcctgagcctgtcctgagcctgtcctgagcctgtcctgagcctgtcct

SEQ ID NO: 43 - DNA, 42784 bp, Sphaerospermopsis sp. LEGE 00249
  LEGE00249_58
taagttccataatatcttttctggagattgtcattttcccagaacatattttaaccgtaggggcgaagcatttgggcgataatgtaacggaaaaatcagacatctagatatcgcaaatgcttcgcccagcccccataaataagttccataatatcttttctggagattgtcattttcccagaacatattttaaccgtaggggcgaagcatttgggcgataatttaacggaaaaatcagacatctagatatcgcaaatgcttcaccctgcccccataaataagttccataatatcttttctggagattgtcattttcccagaacatattttaatcgtaggggcgaagcatttgggcgataatgtaacggaaaaatcagacatctagatatcgcaaatgcttcgccctgcccccataaataagttccataatttcttttctggagatgtctattgatctgcaatctgctttattgctagagagtaagctgttacacagctaaattgtataatcctaatattctgaactattgtttaacaggcaagatgcctgttccacttatacaaattaaatgcacaacagcttataattgattaaaaataatagcggtttgttctatgacagttccacttttagaacaggaaacagaaaaactgataactgtacctggtgtttcttggcaacagtttaaaactattgaagtccagttagaagaaaatcatgctgtaaaattggcatatttagcaggagtgctggaaataatgtctcctattggtgataaacatgaatatgtgaaaaaaaccctttcctatttattagaagcatacatgagatatcaggggattcggttttatggtaggggtggttttactttagaagcagcgggttatgcttcgggaacaccagatgaatcttattgtattgctactaataaagaagttcctgatattgtgattgaaattatcgttagtagtggttcaattaatagaactgaattatataaacctaagggagttcctgaagtttggttttggagaaatcataaaattcaaatttttagtttaaatgctgttttggaatatgaggaagttaaccgcagtcggttttttccagatttggatcaagagttattattgcagtttttagctattcctgatcaatatgatgcggtatcgcaatttattgattttattaatgagaaataatatcttccgtatcattttcaggtggatgccaaccagcagaaacccacgcttgtctaacggtaactgcataaatattattgagttgtaaagctacaactgtaacacgaccaaaggcagttaatcccattatatgtgtaccattgttagtccaagcaaagtgatgtgaccatttttgttgacgaggattaaatagtttaactttctggttagtaactggatcaaatccctctgtttgagtacctttgtatccgttgcatagtctacaagctaaccataagttttcttcatcatcagttccacctttagctttggggataatatgatctatctccaaaattcctaaaacatacttttgtaaactacgacaataaccacattgattatttgcttggtttcgtactcttgcccggacttcttcagaaatttgactagaactcacgcatttaactcttttattaatccacgttttacagcttcacttaatgcagtagcttttctcaataaaccttcctgataaatttgcattaatgcttgtaattcaggatgttctgattctgtgagaataccagcttgttgtctgtctagcaactcagtcaaacggctatcttcttcaggtttcatttgtaattctgtcaactctaaaacttgttgatcagaaagttttgatacaggttcaaggtttgctgcttcttggctaataggtgggatagaaaactggatagtatcaactaagacgctggctaaatcacggtttgctagacgtgcaaagtgttcagctttttggtaaatttcatctggtagagtaattgtgatttggttactcatatttttagatagttttccttgatattttgattataaaggatttgactttaatttattataagctgttgtgcatttaatttgtataagtggaacaggcatcttgcctgtgaaacaagagttcagaatattaggattatataatttagctgtgtaacagcttatgtaggacttacggaagatgtgactgaaaaccttattcttgcctaggggtaattcatttagcttgcttcccgaagggtattacccctactttcgttccattttgcgtaagtcctgatatcttaacactttagattaactaatatattgtttttgcaataattctttacttattttctcttgtctttgcatcaaaaataacatataattattataattaaaattaaacgcagatgaacgccgattaacgcagatataaaaacaggttaattagtcagcttttagtaatttatgtccagattattagtcacccaatatcaaacagaagtccaaaaaatcatccagtttggtggttcaagaaaggaaacttctattcgtttcgcttttcaaaatctgttaaatgaatattgcaaacctcgtgattttttacttattcctgaattagattttaaattaccaaatggtaaagtcgtttatcccgatggaacagttaaagacgctttgcggttagattggggttactgggaagctaaagacgaatatgataatttagatcaggaaattgagaagaaattaaataaaggttatcctgatagtaatattttatttgaagattcccaaactgccgttttaattcaaagtggtacagaaacaatgcgcgtatctatgcaagatgcagacgcgctagatggtattattaataactttataaattttgtccgtcctgaagtccgggactttcgatcagcgatagagatatttaaacaggatattcccatcatattagattctctcagaaagttgattgattgtcaagaggggaataatcaatcttttgaaactgcaagaaataagttttggcaactttgtaaaaagtccattaacccggaaattacattgttagatattcgggaaatgatgattcaacatattttgactgaggatatttttattaatattttcagtgagtcgcagtttcatcaagaaaataatgttgcaagggagttacaaggggtaatttctacattttttactggaagtttaaagcggaatactttgggaagtattgaaagatattatgcggtgattaaaagaactgctgcaaatattgtcaatcatcaagaaaaacagaagtttctcaaagcattatacgagaatttttataaagcatataatcccaaagctgcggataggttgggtattgtctatacccctaatgaaatagttaggtttatgattgaaagtgtagattttttagtacataaacattttggtaaattgttagcggataaagatgtagaaattttagatcctgcgacgggtacgggtacgtttattacagagttaattgattatttacctccccatagtttacagcataaatatcaacatgagattcattgtaatgaggtagcaattttaccttattatatagcaaatttgaatattgaatatacttataaacagaagatgggggtttatgaggagtttgaaaatatttgttttgtggatactttggataatacgttatttgcaggtaagcaaatggatttgtttgcgatgactttggagaatacggagaggattaaaagacagaatgatcgcactatttcggtaattattggaaatcctccttataatgcaaagcaggaaaattttaatgataataatgcaaatcgtagttatcaaaatattgataagttgattaaggaaagttatgtcaaatatagcaaagcgcaaaataacattgttctttatgatatgtacactagatttattagatgggcttctgatagactagggaaaaatgggattattgcatttattacaaattcatcttttattgatggtagaacttttgacggttttagaaaagcgataagtgatgattttaattatatttatgtggttgacttacatggtgatgtgagaaaaaatcccaaactttcaggaactacacataatgtttttgggattcaaactggtgtatctattatgttttttgttaaaaagcaaaatagtgattttaataaatgtcaaatattttatattcgtcgtccagagtttgatacagcaagtgagaaattaaagtttttatcacaaacaaaatttaatcaaattccttttcaacatattacaccagataagaattttaattggataaatcaagctgataatgattttgatgatcttttacctttggttgataaagatgtgaaagcaggaaaagcagaagaagctgtttttaagttgttttctaggggtgtagcaactcaaagagatgaatgggtttatgatttatcagaggaatatttagcagataaaatgagattttttgtagaagtttatcaaaatcaatttaataaaaaagaaaatgaagcactttctcaacaaataaaatgggatgatgatttaaaaagttattttaaaagaggaataaaaaaacagtttgataaatcaagtattaagtcaagttgttacagaccattttacaccgaaaaactttatttagataagcattttaatggtagaacttatcaatggtttgatattttaaatgaaacagacacagaaaataaatatatagctttttcagctttaggaaatactaaaccttttcattgtttaggtactaatttaatagttgatttacatttaacaggtgactctcaatgtctcccattatatcgttacgacaaagaaggaaaccgcattgataacataaccgactggggactaaaacaaattcaaacccattatcaagatgaaacaatcaccaaaatagacatcttccattatacttatgcagtattacataatcctgaataccgcaaaaaatacgaactaaatttaaaacgagaatttccccgcttaccctattatgaaaacttccaaaaatgggtaaactggggaaaacaactgatggaaattcatatcaattatgaaactgttaccccttataaattatcccgtgtggatattcccttaaaagacaccccttcgactacttcgacttcgctcagtacaagttcgctcaccccttcgacttcgctcagggaccgacaaaaaaccatcaaagtaaaattgaaagcagataaaaataaaagtgtaatcatcttagatgatattaccacattaacaggagttcctgaaatagcttgggaatatatgttaggaaatcgtactgcattagaatggatattagatcaatataaagaaaagaaacccaaagatcccaccattgcggaaaagtttaatacttatcggtttgcagactataaagaacaggtaatagaattgttgatgagagtgtgtaccgtcagtgtagagacaatgaaaataattaaagaaatggcaaatttctgaatcagaaaattactgtaacctgtaacctgtcacctgtcacctgtcacctgtaacctgtcacctaactttgtctgaatcaggatcaccaggattaaaagatttacaagatggaataattcgtaattttcaaacttttgtcacctgtaaccttataatatatggtataataaaatatgactcacattaattttttagtcaatctaaaattatgactgaatcagtacaatatataactaacacccaaggagaaagaattggtgtgttgttaaatatggaaacttaccaacagttaaccaatttatcaacagattcagaattattaattggtttaactgagaatgaattacaagcgttagcagaaacttccttatctgtgaaaagtcaaactgaattgaatgatttattgatgaaaaatgctgaaaataaattatctgatgaagaaattgaaactttagataaattaatagcgcaggttgatcaattgaatatcctgaaaactagagcaagatatacgttattttgtctgaatcaggatgtccaagattaaaggatatacaggatgaagtttatctttttcatcaggataatgacaatgaacagcatctttaattaattctcgtagttctgggagactatcagcttgagtaaaaattgattgattaattgctttagcaatataaccaccttcatcatcttcttccactagaaaaataatttctttgatattattttcaggcattattggcataatgtgtaattttcaatcatgaaattttaggttatgattataatatcataattattggtattttttctctgtgtttctgtggtgcgagaaaaaaagaaatgtctgaatcaggatgtccagaattaaaagatttacaagatggaataattcgtaattttaaaattactgtcacctatcacctgtcaccagtcacctatcacctatcaccagtcaccagtcaccaatcaccagtcaccagtcacctaattctgtcagaatcatggtaaactagaaaaagtagcaatttattacagtagctatcgtaaaaatatatattgctgttaatttaaaattttccgttgtttgagaaattggaatgctagaccaaatatttgattacttacactttcatattagtgttgaagcactgatagtattactgatcctagtttttttagaagcggtactatcagcagataacgcgatcgccctcgctgcgatcgcccaaggactagaaaatcaaaaactagaacgtcaagcattaaacattggtttagtatttgcttatgttttaagaattaccctactgctaacagctacctgggtacaaaaattctggcaatttgaattattgggtgctgcttacctgttgtggttggtattccaacacttcacatcccaggaagacgaagatcatcatcatcacggacccaaatacagttctttatggcaagttataccagtaattgcctttacagatttagccttttccttagatagtgtgacaacagcgatcgccgtttcccaagaaacctggttagtcctcaccggtacaaccatcggtatcgtcaccctgcgatttatggccgggttatttattcgctggttagatgaatatgaaaatttagcagacgcaggttatatcactgtagcgtttgtgggtttacgtctattaatcaaagtcattaacgaagctttagtaccaccgcaatggatcatggtaagtgcgatcgccatagtcttaacctggggtttttccaaacgcacagaagtagaaatcaaaacccaagaaccagaaaaaacagaagttaaatagggactggggactggtgattggtgactggggactggtgattggggactggtgattggtgactggggactggggactggggactgggtaagagtttttaccaattacccattacccattacccattaccaattaccaaactattctttcaaccagggagctaaatgaggagtccagctaaccaactcctcatccttaaaccacagtttaatttcccgttgtgcagtttcaatcgcatcagaaccgtggatcaagttccgaccaatattaatcccaaaatcaccgcgaatagtaccaggttcagaggttaaaggattggtagcaccaataatttttcttgcagaagcaaccacaccttcaccttgccaaaccattgccaccacgggaccggaggtaataaattctactaacccagcaaaaaaaggtctttcccggtgaacatcataatgttgttcagccaactctttactgacattaatcaactttaagcctaccagggtaaagcctttagtttcaaaacgacggataatttcacccaccaacccgcgttgaactccatcaggcttgattgctaaaaaagtgcgttccaaagctgtctccaaaagcataaaaaagttatctgggttaattgtcaattgtatgtccgtcttttgtctagtatttacaggaataaataagaagtcaggagatcaaggagtcaggagaatggcttcgccacgcttcgcgaacgaggagtcaggagttcaggagttcaggagttcaggagtcagaaggtaaatatttctccccagtccccagtccccaatcaccattcccttaaccgattcttaaccataaaaaaatctttctaggtgcatatctgttattagacgaatgcgttaaattgttagttcgtgggtgatatacagaggtcaggaagaaatgggtgttgagtcaactactgatgagatggtgaaagtgcctaccaatggtcataaatcagataagtcagataaatcagaagtgaaaaaccaaaagcacaagaaactgttaccacctagcaccatgtcaggggatttatctcggacttggaaaattgaggatagtgaggacttataccgcattgaaggttggggtaagccttatttttccattaatgctgctggtcatgtgacagtttctcccaagggcgatcgcgggggttctctagatttatttgaattagtcaatgctttaaaacaacgaaatttgggactgccgttgttaattcgcttttctgatattttggaagatcggatagagcgattaaacgcttgttttgcgaaagcgatcgctcgttataattatcccggtgtttatcgtggtgttttccctgtcaaatgtaaccaggaaaggcacttaattgaagatttggtcagatttggcaaaccacaccaatttgggctagaagccggttctaaaccggagttaatgattgctctcgctatattggatacaccaggagcattgttagtttgcaacggctacaaagaccgagaatacattgaaacggcaatgttagcccaaaaactcggacaaacaccgattatcgttttagaacaaattgaagaagtagatatagccattgcagctagtcatcagttaggtattaaaccgattttaggtgtacgggcaaaattaagcacccaaggcatgggacgctggggaacatccacaggcgatcgcgctaagtttggcttaaccatcccggaaattatggaagcagtggaaaaactcaaagaagccaatttactcgattctttgcagttgttacacttccatatcggttcgcaaatttccgccatcaatgtgattaaagatgccattcaagaagccagtcgcatttatgtagaattagcgatgttaggcgcagacatgaaatatctcgatgtcggtggtggtttaggtgtagattacgacggttcacaaaccaacttctacgcctccaaaaactacaatatgcaaaactatgctaacgatattgtagccgaattaaaagatacctgttcagaacggcagattcccgtacctacactgattagtgaaagtggtagagcgatcgcgtctcatcagtcagttctcatctttgatgttcttagtaccagtgatgtaccccgcgataccccagaagaaccacaagaaggagaatcaccaattattaggtatttgtgggaaacctatcaatccatcaacaaagagaactatcaagaattttaccacgacgcagcccaattcaaagaagaagccatcagccgttttaacttgggaattttaagactcaaagaacgggctaaagccgagcgtttatactgggcttgttgccacaaaattctggaaattaccaaacaacaagaatacgtacccgatgaactggaagacctagaaaaaatcatggcttccatctactatatcaatctttccgtatttcaatcagcgcctgattgttgggcaattgatcaactattccccatcatgcccatacataagctagataaagaacctacccaaagaggaattttagcggacctcacctgtgacagtgatggtaaaattgaccgatttattgatttacgagatgtcaaatcagttttagaactgcataaattcaaacctaacgaaccctattatctgggaatgttcctcaacggcgcttaccaagaaatcatgggtaacttacataacctctttggtgacacaaacgccgttcatatccaactcacacccaaaggctaccaaatagaacacgttgtcaagggtgataccatgagagaagtcgtaagttacgtacaatacgactcagaagacatggtagaaaacatccgccagcgttgtgaacaagccttagaagaaaaccgcattaccctagccgaatctcaaagactgctacaaacttacgagcaaagtctcatgagatatacttacttgaataatagttaggactggtggttggtaattggtaattggtaattgaaaaaacttgtacccattacctattacccattacctaaattatacttgtccctaacaattcggcgatcgcttggtgttctaaaggaatttccgaaggtggagtttgacgtgcatctgtaattaaccagtctaaagcggctgcttgcacatcaatagctgcaccggtcttatccacacaataacgaccaaataccagcttatcaaccaaacggactcccggactcaagcgcgaccattcaaatatcacactattatctactgttgcaccactacaaatccagcaattaggcccaatcatcgccgggccaacaattttcgcaccatcttcaattcttgtcatcccaccaatgtaaacaggtccagtaatatccaccttatcccaattcacagctacattcaaaccagtgtaaataccaggggcgacttcataaccaggaatctgcacatttttaatttcacccaacagcacaccgcgaatagctcgccaataatcaggtactttaccaatatctacccattcaaaatccatcggaatggcataaaaaggcgcattgatttttacaagttccgggaataattgactaccaatatcatactcaaccccagaaggaatatatttaaacacctctggttcaaaaatataaatacccgtgttgatatttgtgctgagtgcttcctctatcgaaggtttttcttggaaagccttaatgcggttatcatcatctgtgacaaccacaccataactagaaacttcttccctgggaacagacttagtaataatggtagcaattgaacctttagatttatgccactttaccgccgcagttaaatctaaatcaattaaagcatcaccacacaagaccacaaacgtatcatcaaaaaaaggcgaaaagtcttggatacggcgcatccccccagccgaacctatggcttccccgaccagtttaccatcatcatcaattttcccttcaaaagaataggcaatctgcacaccaaaccgctgaccatcacggaaataattttcaatttcctcagctaaatggctaacattcaccataatctcgttaaaaccatgttgacgcaatagctctagcaaaaattccatcactggcttttgcaagatgggaatcattggtttgggaatggtatatgtaataggacgtacacgagtgcctttacccgctgcgagaatcatcgctttcataatttttttccttaactattcctcaactattcctcaaccacaagccagtttactgtttttatcccgtgatacttaatcatcactaagttatatttatcaatgtactaggattctgggttttgctcacgaatattttagtttatagtcgtttatggtcgtttatggggttgcacggttggctgaactaggtaaacggattgtgatctcctgataaaattcttcctgatatagctctactttagattgtgcagacagcagcagtaaagcccaaaaaacgctcaccatgtcgccattttctgattcatggtcagaatcatttgcatttgctgattttttccctgcttgctttgtctgagtccacaaatttaacagttgctctagattccaacattgttcctgtacatttaactcccttgcagaaagatgcagcacctgttctagttctgaagctacttctgttaaattttcttggtgagctaattctaatgcctcccgcatcgttttcatactcggctgacgcttaggacggataggtttgctggttttctctacccgttttagctggttagccataatctgcaattgctcaattagctcttgcagagtcacacgacgctttggtggtggcattgctgctggacgacgacgcaactgtcgctctaattgcaaacgttgaacattgtataattcaccatccgcaatatccagcattgcatcatcagacacattatctataatattatctacggttgacaattgcattaaagtattagctttaaatagtaccagcatggatgctgacaaaaaagcctgtcccgattgagacaaatcagtttcataacctctagcgctggtttgtggtgacattagttctaggtaacggtcaatcacttctatcacctgtacatcccaagggtctatttctcccttttcggcttgttcaatcaagtgtgtaatcgtttctaatagtttttgggcatccattaatttatcaggagtcaggagtcaggagtcaggagttcaggagttcaggagtcaggagttcaggagtcaggagtcaggagttcaggaggaagaaggtaaatatttttccccagtcaccagtcaccagtccccagtcaccagtcaccagtcaccagtccccagtcaccagtcaccagtccccagtccccaatcactaatcatcaacaacagcataactatatacagaatttccatttttgttgtttttaatagcgtcgaaagtgcctttgatagtaccagcaatgggtacagcaaccagtgttcccaacaaaccagcaatttcaaatcccatcaaaatcgctataaaaatccataggggattgagtccgataaagttacccagtaacttgggagataggatattatctttgatttgctgcatgataattgctgccattgctactggaaatgctaaccaccaagtctgtaaaaacactaataacgttaccaaccctatccctaatgtagcgccgataaagggaataagctcagaaataccgatgataatggcaaataatagggcaaatggtactcttaaaaataagaaaatcggtgtcagggctaccaccataaacagtgccagtaataattggctaaggaaaaagttttggaaatttaattgtaaagacctgctcaatgggatgccaatataagatggcaggagattaattaaaccataccacaggcgatcgccatatagcagcatataaaaagctagtacaattactaacactatattcagcaatgctgataataaagttcccgcaaatcccaccgcaccagaagctatctgttgtagaatattctgcacaccagtattaatttgctcagttactaaacttaggtcaagttttatacgtttctgacgtgctaacatttgcaaattttccaggttgtcttgactggaggctaaccaatcaggaattttgtttaaaagttggattgtttggtcaattaccatcggtacaagggtaaaacccaaaataatcaacaaagctaaagtgaagattaaaactatgatcactgcttgagtccgagtaatcctagctttttctaataatttcaccgggtaattcagcaaaaacgccaaaattgccgcaatactcagaatagtaattggatgctggaaataacgaaacagcagagacagtagccagacattgagagcgataatcgggccactcagaccataaattagcagagtttgtaaagaggctgaacggcgcatttgatttaatcttagggaatagggaatagggaataggtaataggtaatagggaatggggaataggttataaaatgtatgataattaccaattaccaattacccattaccaattacccattaccaatggataaaaatattgctgaccttcgtaaagactacactttgcaagatttgaatgaaacagaagttaaccctaatccttttatacaatttaaattatggtttgatcaggctctagaagcaaaattattagaacctaacgccatgactcttgctacctgtacccctgatggtaaaccttcagccagaatggtcttattaaaagattttgatgaaaggggctttgttttatttaccaactacaacagtcacaaaggacaagaaataactgccaatcctcaagctgcgttagtattttggtgggcagaattagaacgacaagtgagaattgtgggatgtgtagaaaagatttctgctgaagaatcggatggatattttgaagtacgtcctcataatagtcgtttgggcgcgtgggcttctaatcaaagtgaagtaattgctagtcgggaagttttagaagtacaattacaggatttccagcgtaaatatgaaaatcaggaagttcctagaccacctcactggggaggttttcgggtaattccccaagaaatagagttttggcaaggacgttctagcaggttacatgatcggttgctgtattctcggtgggatgatggaagttggaaaatacaacgtttgtcaccttaattttttgtagcgggcaagatgcccgtaccacaatttcatgagatagtgttaggatcaatccctagttctcgtaacttagctgctaataattcagcccgttgacgttcctgttcagcccgttgacgttcctgttcagcccgttgatgttcctgttcagcttgttcactactccacagtagcaaatttccctcactatcccaccaccgcaaccagttcatggtttgacataatctttcacctggccaaattcctaaaaatagtgagagttcaggaatccaaaaacgtccattagggtctgctttttgtttgttgtattctccattttgcaaacagcgtacttctaaactgggttcgtagggatcataagtgacataagtgggaacttggagaatgtgttcgtaaaaatacaacttcccataaggtggtgtggaacgtaatgataattctccaccttcggtatcagaaagaaattccatcaccacagctacaggttctccttcgaggttgggtgtataactgcgacgtactacatcagtagctacaggatgcacctgtggcacataaaaccagtcgggggctttgacgatgatttttttgtttaaggcggctacaagcccaaaattagagccaatcagcatttgtgggaggatgcgtcctgctgcacctaaagcgtcagtaagtgcagctgctaaaggtggttgttgaatattttccactgggtcgtcaggtaaaataaaatcggcgggaagtggttcccaggtgacaatgggtgttttttgagttgggtgagtttgtagaatcatagatttatttataataggtgatctgaattaggatttgaggatgtacaggatgttatttaatgatggttggttacgcacaagttactaaagaacgaaccgcaaagtacgcaaaggacacaaaggtaagaggttttagagagattttctcttttcatcctgtacatccataaatgttagttgtcctgattctgacacaaatatcatcattaacctatcattttcaaccaggcaaatatttgattaactgttaattgtaaattgatttctgctaaaattggtaacggttgatcacctctgaataactctggttgttgttggggacgaaaaaccaaaatagaacgatcttcaggatctattaaccaacctaacaaacaaccatgatttaaacaatataaaatattatctatcacgcgagttgaattttgttcaggtgagagaatttcaatagtccaatctggaggaatgaaaaaatcattagggacttcaccttcagcagtaaagggaatatttgaccatttcaaaaccgcgatatcaggaactacggaacgcacaccaaaactacaacgcaattcaggaaaagcataagctattttttcgctttctgtgatatcgttaatactgttgcatagtcttaattgtaagcggctatgttttcctttgggcatgggtttagtgataatttcaccattgatatattccctgaccggttttgtttctgggagtttgagaaattctgttaaggtgagggatcgattaattattgtgggcatgattttttgtatttctatttttagaaagattctccagctaatctgagaacatcattaataatgctatcatttaactacattccttgttgtttcaacatagcaatcacaggagcaatagaagataagtaacctaattttttagcttttactaaaacacctaatgttcccgtgtattttaatttgtgtatattagcaatacgtcgagctaattaatcatcaaaaattaacaaactgccaggtttttctaaacctaaacctaatacttctgcttcaccttgtcccaaatctataatagcaggaattaaactaattgattttaccggagtaattaaaatccaatcaatagaatgaatgtctggtacattaattccttgctttttaccaactgctaattcttcaatcaccgcaggaggtgttaaaatctcactatacagcttttgtagtagctctaaatgtccaacttgatgaagatacaacagaggtgaagtattgactatgactgaagaattaagcactgaataattaagcattgttaacatcttgttctaattgttcagccgtcaaggaaaatggtgatacttgataacgtcctaaaattgttaaaaattctacccgcgaaattcccgctaattgtgctgctctccctgatgagagtttacccagttcaaaaagtttcactgcggctaaaattggtaactctcttgataaattttcaggtgtttctttgagagtgattaatatttcttctggtatttctaaggatactatactcataatttgatttccttgttttcctcgttcccagtctccagactggaaatgcagttttagagtctctgatttgagtataactgttttttgtctgaatcaggatgtccaggattacaggattttcaggatgttatttgatgatggttggttacgcacaagtcatggaagaatgaaccacgaagaacgcaaaggacacgaaggtaagaggttttagagagattttctgttttcatcctctacatccataaatgttggttatcctgattttcaccatctgcgtctatctgcgtttatctgcgttcatgccataatcaggatgtcaaggatttgaggatttacaggatgttatttgatgattgttggttattctgaaaggatttttttgtctgaatcaggatgtccaggattacaggatttacaggatgttatttgatgatggttgattacgcacaagtcatggaagaatgaaccgcaaagaacgtaaaggacacgaaggtaagaggttttagagagattttctgttttcatcctgtacatccctaaatgttagttgtcctgattctcgccatctgcgtctatctgcgttcatctgcgtttttatcctgtacatcctaaaatcctggttatcctgattctgacaaaatacaatttctgaaaatttagatcaatcttcaaaaaccatcatgtaaatccttaaatcctgaacatcctgattcagattattctaaccgccaaattttgatagtcttgtcatcacttccactaactaaaatcctaccattggggctgatagctagggtacgaactttatcagaatgaccagtcagggtagattttaattttcctgtggctaagttccagatttggatagtcttgtcactacttccactaactaaagttttgccatcatcgctgatagctacagaccaaatggaatcagtatgtcctgtgagtgtagcttttaattcttttgtctgtaagttccaaatcttgatagtcttgtcccaactgccactaacaaaagtgttagtattagggttgatggctagtgacctaattccacttaaatgccgtgtgatcgtcaatagtaattcttttgtttgcaaattccagattttgatagttttgtctgagctaccactaaataaagtgttagcatcgggactaatagctagggacagaacccagccagaatgaccatttagggtggattttaattctccagttaacaaatcccaaactttgatagttgtatcatcacttccactcactagagtcttaccatcaggactcataattaaggaattaatgccgttagaatgaccatttaaggtagattttaattttcgtgtttccaagttccaaattttgatagttttatctccactaccacttgctaaaatcttagcatcaggactaatagctagggagctaacccagttaaaatggccatttagagtagattttaattctcctgtttgtaaattccaaaccttgatggttttgtctctactcccactaatcaaagtattaccatcaggactaatagctagggaaagaacagcttcataatgaccagtgagggtatttattaaagtagcatttaggtttctgtttttattaataaatatattttttcctactattgctagaataaatcctaacactaataaacccacactttggataacaatacgacgggaataatatgtttttataggtggtggttgtggtggtttagaaggtgtagatataggtagttgtaaaacttgtaaaacttcctctactgactggtaacggttttgatattctagttgtaataacttatctataacttctcctaattctaaactcacagattgctgtaaatgatcacgccatttttccacccaaccataaccttgttttttccataactcccaaggatgcaccctagtcattaaatgaaaacaacttgcacccaaactaaataaatcactcgctggatacacttctctatcttccatttgttccagggaagcataaccataactcccaattactgtacctggtctcattgttccctggaattgtttagaagcaccaaaatcaattaaaaataatttcccatcactgcgacgacgcataatattttctggtttaatgtcgcggtgaatgattttattactatggactatttgcaaaactggtaacatatccagtaataaattacggatttttccttcatcaaaagttccctgatttgctaactcaattaataaattctcaccctcaataaaatcttgaattaaatataaacaatcatcctcatcaaaataagcttgtaattggggaatttggggatgtttcaggtcttttagttgtattgcttcttgctcaaataattccttagctttttttaaagcgtaggtattttgagtttggggtgcaaattgtttaataacacacttctcatttaatttatcaacatcttcagctaaataagtcttcccaaaaccaccaccacccaaaggtttcacaggacgataacggtttctcaggataaccaaaggaacaccacaattaggacaaaactttgtcgtatctggtacgggtggattatgacagtctgggttcagacaacatatctgattcattgtttggggtagatactttgatatttataatatatacaataatatactcgctaatttcataacactgatgttttatttcttagcgtcttaacgtcagcaccttaacaatttttaacttaaaaatcccaaaaaagtttcaacacccttttttagcccaaaattattgagaatggttgcgaatgacttaacgtattttcaagggtcttgacttctgacagggttgtgttatgatagtttttagaataatccaagggattggtattttctaaatcaggatgtccaggatttgaggattttcaggatgttatttgatgattgttggttattcttgaaggatttttttgtctgaatcaggatgtccaggatttaaggatttacaggatgttatttgatgatggttggttacgcacaagtcatggaagaatgaaccgcaaagaacgcaaaggacacaaaggtaagaggttttagagagattttctgttttcatcctctacatccttaaatgttggttgtcctgattttcaccatctgcgtctatctgcgtctatctgcgttccgaaaatctcaacccaggctgttaaaaaccttatatatattgcgcccacagatttccactcataacataagtgtacaactaaccttgcagcttgtcaagtcgaaaactaaaaaatatgcgattgcacagagagcaggtagaggaggcgatcgctcatatcctgtaaatcctttaatcctgtcaatcccaattcaaaaaaaccgcgtttatctgcgttgatctgcgttttttatgctgaaaatcctgattctaacaatgtatatcgcacataataaccaccccaaacaaacaggataattattaatgtaccaatacccaggaagttaggagtccaaaatacaacttctatatgatttaactcacctgctttgagtttccataccagttgtttagcattcttttctggttggatgatattttcagtttgttgaatattgttaactccccaaggtgtttgtaagctaaaatctaaatcaattattgaactcgtgacatttaagttgtttcctttactggtaagtgcagcaagagaacgcaaatctaaatcatagattaaatgatttctcgataaaagtaaaaagttattatcctgtacaattaagttagatgctatatttggtaattctgaattattgccaattttatcattttttggagcagtgggatagttgaaaaaaacactaaatttttcttgtagttcctttccactggtaaagggtattttgacaataatttcttctggggaaatgcgttttactgaacctgatagttttctagcacgacgttctaaagtttttgaccattcggaaatataatcaccgctaaaactgatgactgtttccggcaatttaatatgttgtactacttcgccgttgttggtatgattaaagttaattcctaaatcatattgtacacatccagataatgttaaagatgccaaaattaggaaaacggaaaatagttttttggcggtttttaaattgataatgtttttaaaaaccaattttgctatttttattaatattaaatgaaatctggtttttggcaaattatctatattcataatattcagaagatgcaaaatattcataaacttgttttttctaaatttacctttttactgtcacctgtcacctgtcacctttcacctgtcaccaactcacacagttaaccaaactaaataggaaattgttaaagcgactgcaattaaagctacccaaataaaacgattatcttttgtattgacttgactgagatcaatatattctggttctgcggttttttgttttgtggtttttttgggttttgcggtgatgactgttttagcttcgttttccccaatattgccaaaatcaggaatttctgtcatccattcttttgggcgtttgagtttgggtgcttttaaaatatatactaatcttttggcttgtgatctggtttcataatggggatgacgggtgagttgttgacaaagtgcgatcgcatcttctgaacgtcccgcagcttcataagcatttaccaaccaaatgtctacttcacctccaaagcgtgtattttttgctaataaggaactagctttttctaagttttccacagattcccgatattgtccattttcaaaagctacttttccagcaatgtaacgatttttagcaatttctaaactttctgtagtcattagtcattagtcattagtcattagttattagtcatgagtcattagttattggttattggttattggttattagttattagttattagtcatgagtcattagttatgagtcattagttattggttactcttcccagtcaccagtcaccagtcaccaattaccaattgccaatcaccaatcaccaatcaccagtccccagtccccagcgatgcactgagcttgtcgaagtgtccccagtccccagtccccagtcaccaatttatcatttaacttgagaacctaaaatcattgtaccaattcccacatctgtaaaaatttctaacaataatgcgtgaggaatgcgaccatcaataatgtgtgcagctttgactccttgagcgagcgatcgcacacaacaagtcactttaggaatcatccctccactaactataccatcgttaatcaattgacgcgcttcaggaatatctactttaggaattaaggtagatgggtctttgtaatcggttaaaataccccgtgtatccgtcagcaaaattaacttttctgctcctaaagcagctgctatttctcccgctacggtatcagcattaatattataagcttgtccgttatcatcagcagcgacgctagaaaccacgggaatataaccattactggcgagagtttctaaaatcttgatgttaacattactgacttcccctacaaaaccaataccttcatcaccttgaggacgagcagtaattaaattaccatctttaccgcacagtcctacggccatacccccagcttggttaatcagagccacaatttctttattgactcggccgactaacaccatttctaccacatccattgttggtgcatcggtgacacgcaaaccattcttaaattgtgcttcaattcccagtttacccaaccaactgttaatttctggaccaccaccatgtactaaaattggtcgcaagcctacacaggataaaaatacaatgtcacggataactttatctttgaggctaccgtctttcatggccgcacctccgtatttgacaacaacggtacgacctgagaatttttgaatgtagggtagtgcttcgctgagaacttcgacgcgattagcttccgcttgcctgatatactcggtatcgttaatcattttgagaattggctaattttcaattttgaggatgcaggatttttacatgatcaaaacatgaaaataccctagcatcacaaaatatcctcagatcaattttgatgttgaacatcttgagttttgagaacactaggtattgctgctagtatggttgccacaatttgttctggggtttgctcctgggtgatggtaatatgtaagtcagcttgggagtaaagcggttgacgttgttgcagtagcgatcgcaatttactttcaggattagaatcttgtaaaagtggccttgtagtgtcttctaacaacctattaaaaattgtttccacgctgcaatctaaccaaactatcaacccatgatgtagataactccagttttcttgtcgcaagacaatacccccaccagtagctatagttaatttagtataagcacaaacttgagctaacacatcactttccaactgccgaaacccagtttcaccttcatcagtaaatatatcattaatggatttaccagcagctttaactatgacatcatcagtatctataaaaccataacccaattcttgagccagtaaccgcccaactgtggttttaccgacacccatcatcccaattaaatacaggttgactcctcttaataaattactcataacttactcaccagtctgattcatttacgctgaacatttctgagcattgattgacaaagctcgaacttttgactccaattaataatttttacattttataggaaataggcaaaaacccctaactggtgatagttaggggattattttttgtaatgcaaaaaattacacatataacgcttgacagatttggtagaaaattagtagaaagtccaaatagagagttttgcactttctaccacctgtaccttaaaaaccagacacagtaaggcttataagctatggagttaagcggaatcgaaccgctgacctcttcaatgccattgaagcgctctaccaattgagctataaccccgtaggttgcactagcaattatgccagattatttccatttagtcaactgtgttcgtaaataatcccgaccattgtagatgcggccgggataatcaatcacaaaagacgagatgagatgtaaatcctagattctaccaatgttatgcaatcctaagataataccagcgcctagaatatgaccgaaagcggcagtagcaagtatagcaggtaaaccaaaaccaccaaagaattgaggtgcgggtgctgcgggttcagcactgggatattgaattgtaaatttaccaaaggcgatcgcaataatattggcgataatcataatgatgccaacggtaggagaccattctaggggtgtagttacagcagcgattagagtagaagtcaacatccgattttctcctcagattacagaattaggggctgataatcttcataattactaataaaattcaaccaatgtcccaattttgcagcattatttaatatttttttgaattacttcataattggtaattggggactggggactgggaaagaaagggaagttaataacccaatcaccagcgattaaagatcgcagatcatttacactcaacataagactgatttattttctagatttactatgtccttgagtcttgactccttaccacctgctttagccaagattgtgcaacgctttcaacgtgcttctgatccaaagcgccgttatgaacaattaatctggtatgctcaaaaattaccagagtttcccgaagctgataaaatccccgaaaataaagtccctggttgtgtctctcaggtatatgtcacagcttcactcaatgatggcaaggtggtttttcatggagattctgattctcaactgactaagggactggtagcacttttaatagaagggttaaacggatcatcacctaatgaaattgtacaactaactcctgattttattcaatccacagggttaaatgtcagcctcacaccttcccgcgctaatgggttttacaacatttttaaaactatgcagaaaaaagcatcggaaataggggtgtaggggagaaaataaccaattaccaattaccaattaccaattaccaatcaccaatgacgactttatctactactggtgtatttgctggtgaagttaaagaatttccctggaattggcaaaatcagccgttgcgggtggtttatgaaaccataggggagggttcaccacttttattacttcctgcttttagtagcgtttccacacggggagaagtgggagaacttgccaagttactctctacccattttcaggttactgctattgactggccgggttttggtgaaagttcacgcttgagtttagattacaatcccgccatatatgagcaatttttagcagattttgtgaaatctgtttttaatactccaattattgtggttgctgctggtcatgctactggttatgtcttaaagctggcagttaaacaaccagaagctatttctaaaattgtcttgttagcaccgacttggcgcggacccttgccaacaatgggggcaaatgccaatatagctgctatggtgcgggggatggtgcgatcgcctatttttggtcaagcactctacaagctaaacactaccccatcctttttaagttggatgtatcgccgtcacgttttcaccgatacaactaaacttacacccgaatttatcgccgaaaaatggcaaaccacccaacaaccaaacgccagatttgcatctgcggcctttgtcactggcaacattgatactattcacagtcaagcggaatttttatccttggttgagtccgtaaacgttcccatcattgcatttataggcgcgtctagtccaccaaaatcacggcaagaaatggacgctttagcaaagttaccaaaaattaccagcgtgattattcctggtactttgggacttcatgaggaatatccagcaattgtttttgatgcaatactgccatttttaaccaatatgtgttaaacagagaatgattctcaatgactgtcaggagtcaggagtcagaatatttgggttaactgctagatggcaaacaagaatttttgacataagtgttaaaaagctgactcctaactgttgatagccaacgaaccaatcatcaaattatctaaaaattgccttaaaattatgatgacttcagaaatagcaaataccgtacccgtaaccgttttaactggctatttaggtgcgggaaaaactaccctcctcaaccatattctcacctaccaacatggtaaaaaagtagcagttatcgtcaatgaatttggggaagtaggcattgataatcaattagtaattgatgcagatgaagaaatatttgaaatgaacaatggctgtatttgttgtacagtgcgtggtgatttaatccgcatcattggtaatttgatgaaacgccgggataaatttgatcatttagtaattgaaaccaccggattagccgatcctgcacctgtgattcagacattctttgttgatgaagatatgcagagtcaactatcactagatgcagtagttacagtggtagatgccaaacatatttggcaacattgggaagcagacgaagcccaagaacaaattgcttttgctgatgtgattttattaaataaaactgatttagtcacaccagaaattttagaggaattagaaaaacgcattcgttcaatgaatgcaatggcgaaaatttaccgcaccagaaattctgaattatcaatggatgctttattgggggtaaatgcctttgatttagaacgcgctttagaaattgatcctaactttttaggtgaagatgcccatgaacatgatgaaagtgtttattctatagctttagtagaatcaggtgcaatagatggggaaaaattaaatgcttggatgtcagaactactcagcaccaaaggaactgatattttccgcatgaaaggcattttaaacattgctggtgaagataaccgctttgttttccaaggtgtacacatgatttttgatggtaaagccgatagaccttggaaagagaatgaaaccagaaaaaatgaacttgtttttattggacgtaatttagatgaagccaagttaaaacaagattttctggcttgtattgtttaggaagtcaggatttgtagaaagtcaggattcgtaggggtttagcagtgctaaaccctgataatagagatggtgagaaaaagacttttcccaatcaccaatcaccagtcaccaattacctaatatatgaacttcacaattaacaaacctcaagaatttacaacctactattcaggtcatcttgcagattatatcacctctctaaattggtcatccacaggtgaaaaactggctgtaatatctgctgcgggagaagttgtcatctgggaaaattgcgaaattactcacttacaaacaactacaggtaaatcaatagactgtgtagctttttccgctgatggtaaatatttagctgtgggtggacaagatggaaaagtaaagatttggcgagaaaatcaattaattaaaaccttagaaaatgcccctgcttgggttgataaattggcttggaatcatactaataatctattagcttttagtttagggcgttatgttcaagtatgggatgcagaaacagaaaaaattgttgtcactcttaactttgaaaattcatcaattttaggaattgattggcgtaaagatggaaaatatttagctattggtggttatcaaggtttgaaaatttggaatagtgaagattgggatgatgaaccttatattttagctatgggtacagttagtgtagcaatggcttggtcacctaatggtaaatatttagcgtcaggaaatatggatcgtagcgtcaccgttttagaatgggaaaatcctgatccttgggtcatgcgtggttttccaggcaaaattcgtcagttagcttggtcagaaattacaactgctacaggtgcaccgcttttagcttcttccagtgtggaaggtgtggtagtttgggaaaaatcagcggatgaatctttaggttgggaagcgcgaattttaaccaatcatgtggatataattaatgcgatcgcctatgcaccccaaagtttaaaccaaagtttaatgcttgcttctgctggtgctgatgggtggttatgtttatggaacgataattttgaagtatcgcaaattctcacaggtgtacgtggtggtttttctactttagcttggcatccccaaggtaaatttttagctgcaggtggggaacaaggagagctactaatttggtcaaaaactaatgactaatgttgaataattggttatgctgtatcagcagcctttaaaggtgaactatgaacataactaaaaacataactaaactgatttttctggcttgtcatctgtttttagcatctttgtttttggtagtaagtccagcacaagcatctactagatggaagactgtagctacttctgatcagattgtagccgcatctgtacaaccaattcccgaattaacaaaacccattttcaaacaacaaaaccagcaaattttaaataatattggttgcagttgtagtgcttgtgttcaatctaattttcataagttgcaaggtaaattacctggtgctgacttttaatcaagttagcaattatcaaacaaacttccggcacagtattactcatgtctgtgcctttactacttgattaatttagctcttaaaacaccacaatattttttggagcatcccaactttgaaaaaataaccccagcaacactaaaaaatctcttaaaatctcttaaaatctcttacctttgtgtcctttgcgccctttacggttcaatcatatcaggatatgggagtgttttatttccttagataaacataaatttacacattgggaatgctccctattttttgatttaaatttaatgtagaaatagcagttatttatgacaaaaaaaatcatatacaagaatttattaaatattgccttattggtgatttccctgggattttctggttgcaacaatcgcaatttcaataccagatatattcagtataatcagacgcaaaatattaacaaaaatcttcctcaagtagtagcaactaccagtatattatgtgatttaactaaacaagttgcgggagaaacaataaacttaacttgtttaattcctcctggtttaaatccaagtatttatgaaccgataccagaagatatccaagccattgaacaagcgaaacttattttatatcatggttataattttgaacctagtttaattaaaactattcaaaatgctcaaaataatgcacccaaaatagcagttgctcaacgtgctgtcaccacacctgaaagattacgtaaaaatggtaaaagtttcactgaaccacatatttggcatgatgtgaaaaatactattaaaatggcagaagtagttaatagtaatttaagtaaaatattacctcaacatcaaaaagaatatagtagcaataccagtaaattaacccaagaattaaacaaactaaacaactgggttcagtccacacttgacactattcctgataaaaatcgcaaattgctaacaacccacgaagccatgatttattatgtcaaagcttatggttttccctataaaggtagtttagcagatattaggaatgaagataatttaacagatacaaaagtgaaaaatttagcccaatatattcaaaaaacaaaagcaccaacagtttttgcagatacaacaattaatcttatgtcacttcaacctattaccagcaaagcaaatgtgaaactttttgatagacaactttatattgatggactaggtaaacctggtagtgatggagaaacctatcaaaaaatgatagatgcaaatacccgcagtattgttgaaggtttgggaggtacttatttaaaatttaagccgaatattggtaagtaaattggtgactggtgactggtgactggtgactggtgactggtgactggtgactggtgactggtgactggtgactggtgactggtgactggataatcaattttatgtttcctaatcaactatcaactataacctttttcccaatcaccaatcaccaatcactaatcagggtttgctgatagcgtagcgtggcgttagccatataaatccgaaaactttacaggtaaagaattttagctattttgacttgtactgagcgacttgtactgagcgcagtcgaagtaagtcgaagtaagtcgaagtgctttcaaaaagtgccagcttttatgaggtggcaactgaaaaaccttgcacttaattcctacttaaagaaaaagtcgttcctatccaactcttgaaactgtcaccgtggcgtagcacctgtcacctgtcatctagctttcacagataactttttcagcaaaccctaatcacctaaactcccgcagtagtttttaccctttctctttttccttttgccactaaccatttaccaccagaaggggctgaagtgacaccacgacgcacgggtttaacaggaatgttgttcactaattcaaaatctaattgtgaaagaattgtggctaaaactagcttcatttcaaatagtgcaaatgacattcctaaacatttacgatttccaccaccaaagggtaaatattcatagggtgcaaattgtttttctaaaaatctttctggtttaaatttctctggttcgggatataaatctgggcggcgatgggttgaatatatgcagcctactaaccatgaacctgggggaaattcataacccatgatttctattggtgatttaacaattctcggtaaggtaatcatggcaatgggataaatgcggagagtttcgttacaaactgccgttaaataaggtaggcgaaaaatttcgtttttatctgtattttcatctatgttatttaactcttgtaacaggttttctcgcacttctggtaaatgatgaatccaatataatgcccatgtaattgcggaagctgtggtttcatgacctgctactaacaaagtcattaattcatctcgcaattctacatcggtcatggcttcaccattttcatctcgcgctgacatcatcaaagaaagaatatcagttcgatttggatcaggatgatctctgcgttcttgaatttctgcatataataattgatcaattttttccctttgtcgtacaaaataaccccagggactccattctcctaaatctacttgtagtgctgggaaaaaattaacggctgctcgtaggggagtatcaccgaaattcaaaagtgaacaaagcagcttttctaattctctaaatctttcaccttcacagataccaaatactgtatgtaaaataacttttagagaaatttcttggattgattctctgacagaaaatggtgtacctatttgccatttgttgatcacttctttggtaatatcagtgatagttttaccataggctttcatgcgatcgccataaaatggtggtgttaataatcgccgttgacgttggtgttctgttccactcagcaacaataaagatttttcacccaaaaaagattttaaaagttgtgaacctctagcatctaatttttctagagaagctgcaaaaagttcttgaattgcttggggatgactaataaatataattggttctttaccaagaatatatgtctggaaaaaatcaccataatctttggcatttttttccataaatccccaagggttgaataaccattggaagcgttggataaattggggagttgtcagagtaggtaagctgggcataatacaaaagattaaaaatgatttcttactagattaacaaatataaccataaatgccaaatatgtataaaaaatctatcttgaggttatttccacctatttatattgatgagtttgaatagttttaatgtcaggagtcagaattcaggattcagaagttattaatgttgacttttgacttaatttatctccccatctccgtcatctcctctgttacctgatccttcctattctctcctatgtattgttacccaatgagaaccaatttgtatttttctttcttccattatttgtttaaataaatctgtagttaatgctgcttctacaggtaaaactccggggtgtttcaatttaccttctaataataatttggcaatactaccagtaccaacaccagaagcaatggctgtattttcatggagtaatgtagaaacataagctgctgttttactatctttttttcctgtgacttctgcgcgtactgctacaccaattccagtaaagatattagtaaaatcggtcatgcgatgactaacatgagataaaaattcaatggtttctttcttctgtattaaccatttaggaaaaatatgggcggttatccaagtgagatggttataaaaatcaggaactgaaccaaatttagtaattacagttttgacattggggaaagaatggggtaaggtgatagtttctggcatatcaaaccagtaaactccattgcgtttgtagggtagggaaaaatttatttcttctctatcagtatagggttgaattaactcccatttgccattaatccaagcattaaaagaatgttgtaaacctaaaaaagtggttcgcatgactgtaacaccagcaccaccagaaccggatactaaataacttaaatgtattttttctggtaaatcaaattgttcgattccttgacggactaaactgttagaaataccggggaaaatacccgtgttaataattgcagtgacaccagcattaacagctttttcatgtaattttagggctttttgggtgtaggaacggtgatcactaacatcaagataattgacaccttgatcaatgcaaatttctaaaacttgggtgtctcgatagtgaaatggtcctgcacagtggatgacaaggtgagagttagcgatcgcctcttgtaatttttccacctcactcaaatctaaaatcagaaattgctctcttcctcccgaagacaagctgacaccctttcccgtctctggggaacgtccagtgatggtaatatttgcctgggtgtggctgagaatatcattagcaactgcgctaccaatgcgtccccttccacctagtattaatacatgatctgtcatgattacagtttagacaacattatgacaacattatttttatttcaccagatttgtgtcccctttgtcatcagttgtaagtatgataagaatattagggttcagaaatgctaaacccctaacccaaggaaatattcatgcttttcatgaggtgatttcctgaatgttcttttctatattatggtgggttttgtcattttctgccattggtagaaaaaactattcgtgatagttggtgatggttgggtgatgttggtttgcgctgcaattaacccaacctactcactacaggaatcctttttaaggagaaaaccaattctctaattttaactcggaaattcggctataatgacgagtgttgttagtgactaaaatatagtttctagttaatgcaacactagcaattaataaatcaaaatcggctacttgttgtcctatttttctcagttcggcttttaattcaccaaacttcttgactgcattattatctaaagttatcactgcaatattttgaataaagttttctgcacgagttaaattttctgctactttttgagaattgtaagcaccaaaatataattcagcaacggtgatgttacaaatacaaatattttcccatcctattgtttgaattttatttgtaactgaagtaatattttttaaccagtaaatgcaggtatctgtatctaataagtaaatcataagctaatatcagagtgggaaatagtacgactgtcataaatttctttaacgatttcttctgctgtgcgttcatcttcccaagcaccatatttttctataaatgtgtttaatggatgtggttgtgatgtggttatattttctggttttggttgtggataatgtttttttaatatctgaataaaatcaaggagtaagatttgtgcttcttcgggtaagctgttaatttcttgagatatttctgcaagtttgatatccataattactacctgttttgaattgttttattactataatactgcttaccggatatcttcccggtcttgtgctgtaattttttaactatatttatcttctaaataatcaatataactctcttttgtattttcttttccttgcgttaacccaacctactcactagatattagtctacttatattctaaaaattcatctacggtaattcctgcttgtctaattaaacttctcaataaacctggtgctagttctttatggttaggaactgataaaataggttttgattcgtgccaaagtatgatatgacttccggtttgatggtctacaacatagcccagtttttcaaagattttgactgcttgtttaccggagatatttgataaacgtcccatttatactaatacttctcctacaaaagattgagattcttttggtacatagggtttaccatgtttttctaatacatgaagatagccttttatagcatctttgatatttgtaattgcttcatctaaggttttaccttgactgacgcaaccaggaagttctggtacttcagcaatgtaaccttcgtattctgaatcataggtgaatattacttgaaatttcatagcgatttttttgggagggcttttttaaatttaatttataagttggttttccttgcgtcaacccaagctacatcttaaatctacttttttatattatggtggtttttgtcattttctgccattggtagaaaaaactattcgtgatggttgggtggtttgggtgatgttgggttttcggttcatcagtacatagtatgctaaactaatatttaaacttccaagtaagcaaacatcttaatcggaaattatcaaaatttctaaatccataagcagaacgtttaatcaacttgagtttgttgttaataccctcaacaacaccgctagttgtacgattatcaaaataggcaataatttcatctaaccaacgaacaatagtgttatggctagtgggataatgttttctagctctcagcaaccatatactaagtttatataaaccctttaacccatccttagttttattaaaaattccccggattttctcctttaattcatacattattttcagagatggtgaaactcgctttacttgattgagcttgattttttgctcatcatttaggtcttcaccgttcttcaataacacatatttacttttatttaacctctctaatattttctttttctctactttctcttgttcattttttgaacttttaatggcattctccacatttcttttctctctttttatggctatatctaattctttgtttatttgtaccattatcggttcagaaatcaaaaaaacacgacctgctttaattttggaaaatgatgtttctaatcaatatagtcctataactattgttgctgctattacttctcaatttacagaacctttgtatcctactgaagtgctaattaaagcaccagaaggaggtttgcaaattgattctgttgcgctgcttaatcaaattcgttctattgataaaccaagattaattaaatgtttgggtgttctggatgcagtgaaaatagaagaggtagatagagcaattcagattagtttgggtttagtaaacctaacataaattaattcctcaaatcaacctattcacttaacttactttcctactaaaaatgttgggtttccttgtatcaacctaacctacagactactttttaagacctttaataaattctgttctcgcatcaataatggaaggtattaaaacacaagttactaacaaatctatatctaaatctggcaataattcgcttttattaatttgctcataattaccatttttcagatgatagagaaataattgatcattttcccaaaaccaaacttcagtaatattaaaccgtttatatttttccagtttatcaatactaccactggtaatattaacctcaattgctaaatctggatttgcttttttttcacctatataataagattcatcaggttcaaaggaagcattattttcttttgcgcgacgagtagcactacctacagggataaagtttatccctttttcacaaaagtataattctagtaaaaaaccaagaatggttttaatcatttcgtgttgttcaccaagtgtcataaattcgatgcacccatcaagataagttatccgcaagtttcctgcatctgcggttaaggtttctatgatttcaaattccttccaggtgtaataaccaggtagaagaaatcgctgttcggaaattgtggtggttttgtctaaggtttggatagtcatagtaaatttatgtttatgactttaattttgattataacttataattttggtggtttttattattttctgttattggtaaaaaatcttgtgtcaacctaacttacttactttagttgtaataaaaacaattaacttatccatataaaacatgaaaataattgctataataaaaatatcaatcagatttattaactgtaatgactatcaaagaattactgttacaagaaattgacaacacacccagcgaacttttagaagatgtgcttggttttttgcaatcactcaaaacagcaccacaaaaacccccagtttcctatcaagaattgttagaaagaatagattacttagaaacaatagtaggtattcgtaaaggattagatgaatttgagcgcggtgaagggattcctgcgaatcaagctttggcaactctacaacaaaaatataacattcctcctcgctcatgaattatcaagttattattcaacctactgcatttcaagaaattgaaaactcctatcgttggatgtgtgataatttgagtgctgaagtaccaaataattggtattatcaacttgaagatgctacttcattaatttttgctgtttcatgatttttctgttgttgactaaattcttcaaacaaggtaaaaaatctatctactgcgcttttttcatcggctgaatggaaaagcaaaatacttgaccataattgacctgtttctacattaaatttctgtcttatccattgtaaaaaatcttgaaattcggtttcttctgctgttaagggaataccaatttctcgacgagcaaaatagtagccgtctaaaaaagattggaggctaaaaatagagtttttacctaaatacattgcaggtctttttttaattttttgcagtaatttgtagagattatccatatttaactccctaattttctaggttaaaagtatgtttctgtgatttgaaactctaatcctgcatctaaaataggtgaatagagattctgtatccagtctaatcgcgtaattccttgatggtggatgttatcaacaacaatttccaccccattgatctcaattataacaccttcatgatgaccagtagtagcaatcaattctccaatactatcatcataaattctgccataaatgggatcttgagaatttgtatctagtttaatatgtttgccatgaataccttgtctaattaaaaattctttgattgctctagtgcaggggatacaatcaaatattccgtaacttctggcaattgctataatttgttgataaattatgtcctcttgatgcaaatttgctcccggtgctaaattttaataattctagtataaattttattctatccttgcactgcttgacgaatatcttcccaatcttgtgctgtgatttctgttgcatttcctgagtttaatccttctaaaagcagggtttgtagttgttcttttgctgtggagtttttggtcttgtcgcactaattcccgaaaatattcacgcttcgctgctgtaacctccttgcgctacttttctatataatcgcgcatggtgtcaggtaaggaaatattcatacttttcataatgtgacttcttgaatatacttttttatattatggcggtttttgtcattttctgccattggtagaaaaaactattcgtgatggttgggtggtttgggtgatgttgggtttatttgtgtcaaactaaactactactatttaatgaaccacgaagacacgaagtacacgaaggaaaaaaagaagagaggaagagatttgatttttatatcattattgttgggtttccttgtgtcaacccaacctactcacttactttaatgcctaaactttggagataaaaaagttatttaacgtctacgtttaatacatttatttactttgtgagatgcaagttttgtacgtttaattttagtaccacagtaaggacattgtactagttttgaaaaagaatgagtttttgttgatggtgataatgaaggagtagttttaatctgggtctttttttgtgatgatagtgaagaaatgcttttaatcttgattgttgaagaagtagatgcagttggattaaaaatcctgtgaatattaatttttgaaagaatgaaattaacaaaatcttctgtagaaatagattgagtaccaaaaattaaatgatttccatcaaaacctgaataatatccttcatattcgtcacctgagtaattagctacagactgtctcacctgaatttttagttcttgttttaattctgctaatgttgcaagttttcctgcttctgcattatctatgaattttaacaaactcgattgacaacgtagaattgctttactaattaaaaaaatattactaccaaattgtattctccaatcacttgggataagttttgatgtctcatttttacctaatgcagctaacattgcgtatcttgtaccaacaggatcatcaatacgtttaaaatgatttggagcgtgtactggatgtccagaaggatgtttataccaataagcagatttcttgatgatttcctcagctaaagaacgatttactgaattattttgtactaaattgatgattttttctcgttcttgcatatataagttttgttcttccataaacaaatacctcactttatgtttactcttttatagttttcaggtttctagcataagctttttgtccgttaccacccttaaaataaactataccgtcttcactaattgaagaaataattaatattttctcagggttattaatatgaaatactttacttccatgttttaaattttctgtttcgatagtgttaagattgagtatagtcatagttgattcgatcactgcatctacaacaaaccttttttcataagatacatcaatgccgaactgagataaaaaattaatttgtttttctgtaggaaaccgatcatcaaaattatcaaaaactaaatcgatataattttgtataacaatataagctactccttttggataatttttaatgtcaatccctaaatatttggcaaattctacctctttatcatctacacgtggaattttattaaagtagtcagaacgtagaaattcagctacactatcagatatctcaaatttttttacaatcatctatttgtaccatttatatacaacacaattacctctagcttcaatttcaacgttgttagtgttaaagttttgtttaacattgttaacaaattcttgagcagcttcctcagatttataggcacatacaacttcttctttgactatttttttggaagtagatgtaatttctgggctaactggagaggattcgactttaggctcaactggtgttacattttctgttggaggttgtacaggttctacaggttctacaggttctacagattgattaggtggattttgttgtgaacaagaaatagagataaaaacaatcaaaattgatagtacaagtaaatttccaagagtaagtttcatatttaccctttttatagatattaagataattacatatatagctgaatttagaggtaataacaacggcaaatttacacaatgtgatgctaatttacatacgtacatttactgtcataaaacttaattactcatataaaaatcaccattattagcctgtggagtgcgttagttttaatttgcgttggaataagtagcttttttgactatatccttaaacaacaatactggtgactacatataagagatatgttaatttaagcagattaattatgtcgctctactgataaaaatgctgattaaatatgtccaacgttttaatctaattctattactgttaattattaactacggctgttctaatccaaattcggaatttgataatagactcaatgaacttttgaatagtagcaaaagtaatgaaataaatacaagacacaagaaaatttttaatgaactatatggttgggataaagccagacaagaaggtatagaatactgcaaattattaactaaaggcttagataaagaagagatacggaaaaatcaatctctagctggtgtagaactaatcactcaaggtaagcttacagctgaacaatcagcagatatagatcttgtaaatattaagatacaactggcagcagaaaaagcatattgtccagaacataaagactcttgagaaatcatgacataatagtattaattgttagcattaaatcttgttttatattcttgcattatacgcttaaaactatcagcattagcatttgttggatagtttataaaattactgaacgcatcaattagactctcaactatatcatcagatattgttgttggattttccataattttttgtatagatttatgtttcatattttctctaactatatcaggcgtattggcttgataactaatcattatgttttcaatctcgtgataacacttatcagatggatcaagtttatataagtctataaggatcgtaagtttttcaaagtcgttcatacagttttcttgttttaaatcatgaatatctgaatattaatattctaattattttaatttaaaatatcaaatttaataattaatttatgtttaataattattctattcctaatacaagattagctatttttgattaatctattaagctaatcatatatataccttaatcaaaactgcaaatgtacgcaataaacaccaaatcatccgcgttcatctgcgtacatctgcgttctaattaatgcaccaactcaatagcccgcttcgtcaacgcttccgcagtcaacccattaaacgccatcaactcacccgcactggcggtagtttccccacgcttccaagcgaaaatattccgcttactggtactgcgtaacataaaacaattaattgttatttaaactcagatagcgacgcaaaatattttgaccttgttctagtaattctgtttctaattctcctaatttttgagtcaaacgaactttgtcaaaagtcatcggttcaacacatatcaaaagactatctacagaaagtccgttttgtgctgatgctggtacttccactactgctggtgaaatacgggagttattaaattttgcagaagtaaaaggtaaaactgtgactttggtacgttggttattaaacaaagttccagaaattatcagtgctggccgagttttttgaatttctgtacctaccgatgggtcaaatgttacgatccagatgcttcccattcggtaatcgctatgttttgccattcactttcccaacctaattctaattcatcaattacagcgcaagcagccgctagtgcttcatcttgtctttgtttttgccattgtttcaatagactttcaattaatgcactacggttatcaactttttggtcaatgtaattgagtaagtcatctggcaatgaaattgagattttagccatatcttacctctagtcataccattggtagcataacagattttaatatttttagtctagtaattctgtcaaaatttttctattaggtaattaattggataacttgggaatttgatttattatactgttgagttttataacagataaaaacagcaaatgtacgcaacaaacgccaaatcatttgcgtacatctgcgttctaattaatgcaccaactcaatagcccgcttcgtcaacgcttccgcagtcaacccattaaacgccatcaactcacccgcacttgcggtagtttccccacgcttccaagcgaaaatatcccgcttgctggtactgcgtaacataataggttctaacatcgcaccagcacaacccaccagttaacccataacttaaaaagctgttattcagtttaaaaaaattcttaccttggggtcgggaactctaaattgtaagcaagcctatttatcgttattcacgttttgcagaccgcatccaattttatgctccaaggagtacccaaggctcacactatatatattacaccaaatcagtttgtaggatgggtagagcgacagcgaaacccatcacaatttttaggatgttgggttagtttacggcaagttgatccacgtctacatcccttaacccaaccttacttactacttaatacttatttcttcaaaatttaagattattttaattacaatattttcaaattctctattaatttgttcaagttttggtaaatctttctctggtaaatttctaaatttatgaacaattaaacttctgacagagtataaagctaaaggcaaactatttttgttatcactattaaatgctgtaagtcagaagtgttgaatgttaagaaatctgtgataaaaatagcccaaaatatattaaaatttgagcaagctatatcaaaatattgatttgatcatgattataaattcatttcccaagattgtcaaagaca

SEQ ID NO: 44 - DNA, 42198 bp, Sphaerospermopsis sp. LEGE 00249
  LEGE00249_59
ccagtccccagtccctaatcacattcctttacactcaaacaaatgtaaccccaagcgttgagatagttcctcacacaccttcaccccccgcacactgttagcacgcccatctagcaggggtgaaaacactccaattcccatctgaccaggaacaacggcgataattccgccagaaacgccgcttttcgctggaattcctactttatacgcccattcacctgcaaagttatacatcccacaggtatacatcacactcaatatatctttgatataacaactgtctaccgctttttccttggtaatcgggttcactcctttattagcgagagtagcagccatcaccgccaaatctcgacaatttaccatcacagaacattgttgaaaatataaatctagtgcttcttcaatattttggtcaatcatgccaaaatttagcataagatgggcagtagcgcggttgcggtgtcctgtactgcgttcggaagtaaataccgaaatatctacaaatacatctcgtccaatataacgcctatacatttctaataagcgattaaggcgttctgttgctccattacctttaattaaactggtagtggctatagctcctgcgtttaccatcgggttatagggtcgctttgattgttcatcaagaataatcgcgttaaatgcgtctccagtcggttctactcctaccctagttaacacataatcccgtccatgatcttctaaagcttgtccataaataaacaccttggaaatcgactggatagtaaatagctgttgataatcaccaacttcataaatctgaccatctacagtagcaatacagatgctaaataagttggggtttacttttgctagttcgggaatgtagtttgcgactgtaccctcttgcagtgatttgtactgggaatgcaaatccttgagaacttctaaaaatggtgatgaacctgtttctcgatcttgtgagtttgccataaggctgataacttgcaaataaatatggtagttgattgattagttgtgtttatctgctaaaagtagttttttatacttaaaaaagtctactttacaaactgacaaccttttctctattttcccatcattactttttttgatgaaaccaatgcttattactaaaaatagatatttgtcaacctgaaaattacttaacaatcaattttaaacaaatactatatttaccaatatttttaaatagcctttgtattatattttattcgactctgaaaataatctgaaaataaaaaacgtatttttttcagaaaaatcattgattattcatagtttttttggttaatttcttcaaatcgagcaaatatcaattataaatataaatactgataattaagatattaagttctaataaatactaaaaatattgaaaatttgagttatatatgttactatgattacaaagctgatatcaaacaatcaaggtattaagaacttgagcgaaaatcaacttcatatttcatgttcataaaaaattattcatatcccgaaaaaaaatgttacaaatccaaaaacctgatttgcaaaaggttttgactgatcaaacccaataagaattgaggaaaccagcgcaagacttacgctaaaaccctgatccccaagcccaaaagttcatgttactctgttgcagttataaacaaaaagtgaaagcggaacgagttcgagtttcaggttcattcaccaacacaggtgaaaaagccatgaaccacaaaactcgaattacaaaactttaagttctagagtcgctttaaaatcggaagcatgaatcaaagacatttgtggactactgtcgctgtgtttctgtctgttttgagtgtacccgcagtgggtcgtactcaaaccaccaagggaaactctccaactacccaagcatctgccgtagctgatgcagtgaaagtgggagagtaccaatccccgacacaggaaaataccttagatgctgtgaacacacaaattcatcctcacagcgttgaaggtcgtcaagcggcaaccctttacatccgaaatattcccgttcttacctttctgggttctaacccagtcaagagtgcggaaacaaaagtgggaacaattggaaatagccaaggcgttaaatcttatatccctgccgccagtaactcagctaaggtagccagtgtaggaagtgtgatggatgtgagcaaatctcctagctccattattgccgatgacccagtacacagagccagtttagtagcctccaaaatcaaccagttgatgcgggaggatgcagacgcaagcaaaattatcgtcagctggaaaacaggggaaaaatctccagtgaatcataataaagcccaagacaaaggcttctctgttgaacagcaacctgatagctacaccatcaaaatcaacggtaaagaattggtggaaatcaatgaatccacccaactagcaaatactacaaataatctagcacaagatgcattacaagcaaccaatcgcctgcggagactcataggccaagcatctcccatcagcgaaattgccaacttaccaccacgtaccaccatttccatgcccaagctaccgcaacaagttgccggtcgcatcaaactcaacttccagggtatagcttcttggtacggttatgattgggcaggtaggaaaactgccaacggtgagagatataatcccgaaggaatgacagcagcccatcgtagtttacctatgggaacaaaagttcgtgtgactaacacccggaatggtaagtctgtagttgtgcgaattaatgatcgtggtccatatatcggtggtcgagttattgacctttctctgggtgcagcccggatattaggaatgatgagcagtggacttgctcccgttcgtattgaggtgttgggaagataacaccctttcacagtaaaaactctttttcgctcttcactattgtttgatacccctagttcattcatctctcaccccaattttagatataaactaacgggggagaggatagagaagaactaggggtattttgtgcgcttgctgacaacagttgcagctttacgctgctatttaaatcaacgtcgctgggaaagtaatattaaactttcagacgagctattatttgatgatcagactacttggtatcctacaaaaattggtttagtccccactatgggcggactgcatcaaggtcatttaagcctaatggaacgagctaggcaagaaaattctactgtgattgttagtatttttgtcaatcccctacaatttggaccaaatgaggattatcaacgctatcctcggactttagagcaagatcgaaaattgtgtgaacaagcgggagttgatgcgatttttgcccctactccggaagaaatgggaattgctcagaagaatatacaagaaaatcaagtgacacaagtaatccctccatctggtatgataagtagcttgtgtggtagatatcggccgggtcattttcaaggtgtggcgacaattgtcaccaagctttttaatttggtacagcctgatcgagcttactttggtgaaaaagatggccagcaactagcagttattaaacgtctggtggctgatttaaatttgccagtagaaattgttgcttgtccaacggtgcgggaagcgtctggcttggctttgagttctcgtaatcaatatttgactgcaacggaaaaagatcaggcaacagtgttatttaaaggcttgcagcaagctgaagcggcgtttcgtgctggcgttcgcaacagcagccagctgatagcattggtgtgggaagaaatcgcaaaagtcagcactatctatgtggaatatattgaattggttgaaccgactacattgatgtttctaagaaaaattgaggaggaaggaatgctggcgatcgcagcccgtctaggttctacacgtttgattgataataccatcttgcgcgatgtttacaacgggctacgccaaccgattatcgccattgatggtcctgctggtgcgggtaagtctaccgtggctcgccaagtggcaaaccaactagggttagtttatttagatactggtgcaatgtaccgtgctatcacttggttagtgctggaaaacggcattgatattgatgatgaatgcagtattgctgaattagccaaccagtgtaaaatagaacttactcctagtcaaaatatacaatttcccgtacaggtatggattaatggtattgatgtcactcaagaaattcggagcattgaggtgacatcaaaagtatcagcgatcgccgcgcaaaatacagtccgcaaagccctggttcaacaacaacaaagctgggggaaaaagggtggtttagtagctgaaggccgagacattggtactcatgttttcccagatgcagaagtgaaaatcttcttaactgcttctgtgagtgaacgcgcccgtcgtcgtcagcaggactttacaaaacaagggcaaccggaagtaagtttagaacaactcgaacgggatattgctgaacgagattataaagatagcactcgcaaaatttccccattgcgaaaagccgccgatgcagtggaagtgcaaaccgatggacttactcctggtgaggtggcagcgcgaattgttaattattaccaggatcgtttgtctcaacggtaattaccgcagaattcaggattcaggagttcacaataatttgtgatttcccaatcaccaattacccattaccaattacccattaccaattaccagccccaactagagaactagcaatctgggttattactaaagtgcagtggtttaaggttcactttggtagtagaatagccatgttaagttttgtgtcccaatatcaaggatataaaactgactcaatacaaaacctgaaattttctggtttttggcaatagctttaactggaaaacaataaagagaggacttgaaaacatggcatttacacagcttcccctaccctacgactttaatgctttagagcaatatggcatgaaaggtgaaacctttgagtatcactatggtaagcatcacaaagcttatgtagacaacctcaataaactcaccgatggtacagaacttgctgataagtccctcgaagaagtaattcaaatttccttcaaagatcctgccaaagctggcattttcaacaacgcggctcaagtttggaaccacaccttcttttggaactcactcaaacccgcaggtggtggcgctcccacaggtgaactagccgagagaattaataaagactttggcagtttcgacaaattcaaagaagaattttctactgcggctgcaacccagtttggtagcggttgggcttggttagttgatgacggtggtacactcaaagtcatgaaaacacccaacgcagaaaaccccctagctcatggtaaaaaggcactgctcaccatcgacgtttgggaacacgcttattacatcgacttcagaaatgcacgtccagcattcatcaaaaatttcttggataacttggttaactgggaatttgctgcgtcaaatctagctgcttaattaagaataaagcttttagggaaaatccccatgcttaaccagcaggggatttttaatttaatttgcgctctcacccccctgatttctcaaggctttattgccaaatttgacagatgcgagtttaatgtgtttatacttgctcctcgtgttcctgatctctaactattggcgcaagcagaaccaggacaactaccagaacaaggaaggctacggggacaaggaggaatgaacataagagggtaaaaaaattcctcttgtgctgctgctgtagctgttttaccatcttcacttcctattcctaatcctttcaagtgattctgtggatgttgctaggaaactggaagccgtgttgagaaactgtccacattggtgattggggactggggacttataactacaactttagaaatattcaacttattgaacatcagcattttgatataggcgatcgctcatattgccagatccacaacaatgagaatatagcgatttgcaaaactgactaaaaggtggacggttaatgtagcataactaaatgattgtgtcagccacgcgatgatctaatttccaagatggtacagactaactcaaaatccgcacgcgaaatttttaatatctccagatgggcaattaaattttcgtggttgacggtgtgtttttggatcggggtgacaatagcgggtattctggcttttagttctctcaaatacgccctattccctgatattacttttcccgtggtggtggttaatgctcaagcacccctcacttcggctttagagacagaagaaaagttaactaaacccatagaagaaagcctcaagtccctggcaggtctggaaaatatccgttcttccagctatccggggcaaactgctgtaagcttgttgtttgcagtgagtacaaatttagaaacttctacggaaaataccacaactgcactcaaggatttaaaactgcctgaaggagctaattatcagattattcctttaaacctgaatgagtcatcagtcattagttatgccattgaaagcgagtctggcagtttggatgatttgcagaaattggcagatgagaaaattgtccctgcgatcgccaaattaccaggagttctcaaagtctcactgctaggcactccaccaaaatcacctcctctcaatcctaccaatgccactgcggccttacctcaagggggcggaaatttagtcagatttaatggtcaagatgtactagcttttcaagtcattaaacgtggtaatgctaatactttagaagttgtcagtcgcgtagaacaggaagtagaaaacctgcgctctactttcaaagatgtcaaatttaccctagccgctacccaagcagaatatatccgcaaagctacccagtcaaccatagatgcgttgatggaagcgatcattttagcaattgtcgtcattttcccatttttatggagttggcgagcaactttaatttctgctttagctattcccacatctttgttagcaacgtttattgtgatggcctttttcggctttaacttagaaacaattacgttgttagctttggctttggttattggtagtgtgattgatgatgccattattgatgtggaaaatatcttacggcatattgaagaagggcaaagtccccgtgaagctgcacactcagctaccgatgaaattggtttaacggttgttgctactactgctactgctgtggcggttttcttacctattggtttgatgggtggagttgttgggcagtttttcaagccttttgggattactgtttcggcttcttatattgcttctacattggtggcgcggactttatcgccagttttatctatttattggctcaaacctgttaagaaaagagaattgaaccacgaagagcgcaaagaacacgaagggaagaaggtttcagagagttcttgggtgggtttggcaaatattggggtttattttactgaagcttatcgcaatttattagcttggtctttgaatcaccgaaaaatagttattgctttagctgtactcagttttgttgctggtattgccctagttccttttattcccaagggttttattcctaagttagatcggggtgaatttaatattacctatactgcacctttaccgcaaatccctgatttagcagctttacagcagttaagaagcaggggtggttcgacttcgctcaccaagcaggtagaagacagaagggaaataacgtcccagtcccccatacctattcctaaccctcttaatgactctttagaggtggcaaaaaaactggaagcggaggtaagaaaatacccagatgtggaaactgtgttcactacggttggttctcgtggaggtgaaccaaataagggtaatctctatgtcaagttgaaggcaaaccgcacaattaaaaccgcagaattacaagatcaattgcggcaaagtttacctcaacttcctggtgtgtctaccagtgtggaagatattcaatttgtggatactggtggggaaaaacctttacaaatagcacttcgtggtaatgatctgaaaactttgaatcaagcggctaaaaaaattaaagatcggattactaaaatccctggttttgcagatgtgacagttacaggtgaaacaaataattcagatcaagtttttcagattgaacgactcaaccaacaacgggtagcttatgtcagtgctaatttgggtcaagatttaactttgggtaatgctacagataaaattgtggctgaagctcaagatattttacctgctgatatttctttagatttaggtggagattctgctaaacaaaatgaggtttttagtagttttatttccactttgattttatcagctttgtgtattatcgttgtcttgattttactgtttaaaagttgggtagatcctttagtgattggtgcttctttacctttagctgtggtgggagcaatgttagctttactcttgactaagagtgattttggcatgatttctttgattggttttgtgtttttactaggacttgctaataaaaatgcgattgttttggtagattacattaatcaattacgtctctcaggtttggaacgcacggaagctattcttaaagctggacctgtgagactcagaccgattatgatgactactgtctctactattttagggatgttaccaattgctttgggttttggtgcaggttctgagttgcgatcgcctatggccgttgctattgcaggtggtttggtgacttctactattctcagtttaattgttgttcctgttgtctatgccattttagatgattggtttcccagaaagaaggtgacaggtgacaggtgacagttgacagttgacagagttagatcctcgattttttcaagaagtcggggatctaattgatatgattaagggatttacaggatgttggtttgtgttataattttgttgtctgaatcaggatgtccaggattttaggatttacaggattttagttttttcaatttcttagcacatcaaaaaaattaaaaaaaattaaattttgaaaaaaaattcgttttttggggttcaccccgttgacttttttgtctagacttgatatttttataatgggaatgtgtgccttacaaaaaattttgcttacactccattatattaatatgactatcataccacgtttaccccgacggcaacacctaaaaaaaagattttttgaagaaaaacttattaatttttaattttcaataattcaaacttatgaattgggtaaaacttcagtttttttcttttactacatcctgaaaatcctcaaatcctggatatcctgattcagacaaaaatcctgtaaaatcctaattcataacagtaattaatattctagactaccatgaaaagtgaagatcatcaacgagtagaaatattcctcaaaaagtggaaaggttcacagggtaacgagagagcaaattatcagggtttctttttagaactttgtgatgctttggcggtagaacgtccagcactcaaaggaagtataacaggcgatcgctattgttttgataaagacatcaagatatttaacaaagatggagaaactaccaactttgcagacttctacaaagaaggacattttttaatagaagctaaacaagggggaaatacagctaaacggggtactgctaaacgagggacaaaaacctacgatatcgcaatggaaaaagctttttatcaagctcaaagttatacaccttttctaccaagtaaacctccctttttaattacctgtgatattggttcacattttgaaatgtggatgagttttagtggtaactatggtggttatggtgcgcgggaaaaaattgatcttgatcagcttttagatgaaaaagtatttaatcgtttcgttgcgatatttaatgatccgcaaactttaaacccggaaaaatatcgagcgcgggtaacaagagaagttgcagataccttagctaaattagcacggtggttagaaaaacaaggacaccaaccccaagaagtggctaattttctcatgcgctgcatttttaccatgtttgcagaagatgtaaaattattgaaaggagaagttttcactaaagcattaaaagaacgctggttagttgaaccgaagacgtttaagacagatattgaaagcctttgggatatcatgaatactgggggtagatttaactttgatgaaattccccaatttaatggtagtttttttgctgatgcgacagcttttgatttacccaaagaacagttagaagtgctgtatgaagctgcaaataaagattggacagaggtagaaccggcgatttttggcacattattagaaagagctttagatagtaaagaacgtaaaagtttaggagcgcattacacaccccgatcctatgttgagcggttggtgcgtcccgtagttatagaacctttacgggaggaatggttattagttgaatcggaagttgatcgatttttaactctgaaagaaaaacagcaaaaaccgacaaaagcacaaatagaaaaagctgaaaatgagattcgggcatttttagagaaattacaacaaattcggattcttgatcctgcttgtggttcgggtaactttttgtatgtgactttagacttgctgaaaacattggaacaggaagtacaaatgcgcttgctggatgttttggggaaggtgacaacgaatttattagaagaatttgatccgcgtttagcaggaagaaaacaggtaaacccatcgcaatttttagggattgaaattaatcctagagcggccgctattgcagagttagtaatttggattggttatttacaatggcattttaaacgctatggaagtacaccaccaccagaaccgattttacaggattttcataatattgaatttcgggatgcggtgttagattatgatgggagggaattagatattgatccaaaaacgggtcaagtgaaaactcgttggggtggaaaaatgatcaagcatcctgtgacgggtgaagatgttccagatccgagtgatcaaattcctatttatcgttatcttaatcctcgtcctgctatatggccagatgcagattatattgtttctaatcctccttttattggaaataaaaggatgagagaagttttagaagatggatatgtagcaactttaagaaatacatacacaaatgtacctgatacggttgattttgtcatgtattggtgggagcaagcagcaaatttaatcagcaataaaaaagttaaaagttttggatttattactacaaacagcattactcaatcatttaatcgagaaattttaaataattatctttcaaatcaaaaaatttctttatcttttgcaattcctgatcatccttggatagatgaaaaagatggtgctgcggtacgtattgcgatgacagttggtgttccagaaattgaatttccaggaaacttattaaaaacaaaaactgaagagataaaagaagacggaatttcaatcattgaatttgataatgttcggggtttaattcatcctgatttaacaattggagcaaacattacagcaatgaaagctctaaaatcaaatgaaaaaatgtcatttcagggtgtcatacctttaggtacaggatttcggattgatgaaactgaattaaatgatttaggtttagatattaataatttaccatctgttgtcaaaccttacatgattggacgtgatgtggttcaacaatttaaactcaagtggataattgatttctttggattttctaaagatcaagctgctcagttattccctttgttgtatcagagacttttattaaccgttaaaccatcaagagatacacaaaatagaaaatctaatagagaaaattggtggttatttggagaaaaaagaccaggattaaggaaagcaattgaaggtataaatagatttattgtcactccagatacttctaaatttaaaccatttacctttgttgatgcttccgttattcctgatgttcaactttattctgttgtttcagatgatgcttggatattaggtgttttagaatctgctattcatcaaacttgggtatttcaggttggacctactttagaagatagacgacgttggaaaccatcaattgttttcgatcctttccccttcccaaatcctacaccagaacaaaaacagaaaatccgagaattaggagaaagattagactcccaccggaaacgagtacaaacacaacatcctgaaatcacaattacgggaatgtataacctgctagaaaaactccgtaaaggagaaacatttaccgaagcagataaaacatataataataaagctttagtttccaccctcaaacaaattcatgatgaattagataatgctgtttttgatgcttatggatggcaagatttaaaagataatcaaaaaacaaaagcagaaattgaagaaattatcttagaacgcttagttactctcaatgctgaacgtgcagaagaagaacgtaacggtatagttcgctggttgcgtcccgaatatcaagcaccaaacgaagttactcaaaaagtgctaacggaagtaatggaaacagaagcaaccgttattattcccagcgaacaaaaaacttttcccaaacaaccaaaagagcaacttgcagctatccgcgacttactccgcaccaataccagcgagtggactgtggatcaaattgctgctcaattcaaaaatggtggaaaatacaaaaatgccattgctgaaaatgtggaaagattagaatggtttggaattttaatctgtcgagaaaccggagcaaccaaacgctggcaatatgtggaaatatagtaaaatgtctgaatcaggatttacaggatgttggtttgtgttataattttgttgtctgaatcaggatgtccaggattttaggatttacaggattttagtcgtttcaatttcttaggacatcaaaaaattaaaaaaaaatttaattttgaaaaaaaattcgtttttttggggtctaaccccgttgactttttcgcttagaactgatattctgataatgggaatgtgtaccttcaaaaaaattttgcttacactccattatattaatatgactatcataccacgctgacagcgacctgaaccctgaaaaaacaaaattttttttgaaaaaacttattaaaaaaagttatttaataattaaatcttattgattatggaaaatattcggaacttatttgttcaacataaaatctttattaacagcagcattttgtatctgattgctaaacatatctaacattgcgataatttccgtatgtaattctatgtatttttctctactaaccagtaaatcgttaccgtgagctatttcatttctagattttaaaaggctttcatctattaattttgacttagtaaaatataatgaaaaatctaatcctaaaatatcagtgatgtccttcaaaacttgagaagaaagattggaagctgtagatattgcttttttgggtaaagaacatctcgtatttaattgggaaagaaaaaagtcacaaacaggtatatataatgatggtttattggtgtctttggcatctttgagtttttctttcattgctaaagctagaaaattactagcaagctgatcataacgaagtctttgcatatcaacatattccagataagaattagctgctaatttaacaaaaccctcccaatgagcatataaaatacatattccactgcgaatacatacattatgcctttgaggagaaacattttttaattctattaaggattttatttctgaaagttccttttttctccaagcaagatcagttgcaaggatatcacttagttgttcagcagtgcggatgctcatgagggagaaaatactcctctacccagtggaataagatagggtaaacgtcttacagcattcacacctgcaccagaccacttttgataagttggatctgaccaaatagtttttattaactctgatattttatttattggaggcagattttgataattgtgtccaattcctaatgctactacctcaaatgcggataatagaaacccgccaagaaatctatcttgttcagatttatatcttttgaaactattatctcctgtagtttgattcaggacatcaaatgttgtcttgaatgccatttctatctggctataatctaattcttgctcaagagccattttacgcatttcttctgttagaaaaaaactaacatcgtcacccaattttctaatatcttcctccgccttatcaaatagaagaataaaccgcaatactaactccatgtcatactgttcttcataaagcctatcactcaaggctatacaatttctgaatggttcataatttgccagtgatcgcattaattcatggagttttttatttagcatcaacaggatacaatttctcatttcttgaggtgtagcaattgttcctcctgtattaagtcgctgaaatagctcatatttaatgatcgcatcactttctttttcaacaatatttactcctatttttgctcgcctaattaataaacgttgtgtttgagttaaggagttttcaggatcattaggatcatcccactttttacctgctaaggaaggtaagtatgtagttttttgcaaagctactggatgtgtattttcttcttgattatctttttttaaaagacctgtaaattcatatatagtggatagtctttgaacaccatctacaacgtcccaaacaccatcatttctttgactaacaaaaatgggaggaattggtatgcctaacagaattgattctataaaagcagatttttgatgttctgaccagcgaaaaactctttgaaactctgggttaatatcaatctcattactctgataaagactcatccactctccaatagacattgagtagccatcagttttaatttcttgcctagttttgtcaatttcttcttgtaggggcataattacaagtaatataaacgtttgtgtatataactatcttgcttggataattatagttaacataatatcattaaacaaagatgaaaaacccaaaatctgagctaagttacccagatacatagataataacatattgaggagtgagaggttattaaatgcgggcttttgtaactggtggtacaggttttgtaggttctcatgtagtgcgatcgctattagaatcaggatacaaagttacggctttagtacgtcgaagtagtaacctgggaaatttacggagtttagaaatagatattgtcaaaagtgatttaaatgatcccaatatctggaaacagatgcaaggttgtaattatctgtttcatgtagctgcccattattccctgtggcaaaaagaccgcgatttactgtatcgtcataatgtggaaggtacaaggaatattttagcagcagcgcaaaaagccggaattgaacgcacagtttataccagttccgtcgcagctattggagtaggaaaatcgggtaaagttgtggatgaaaaccatcagagtccagtagagaagttagtgggagactataaaaagtctaaattcctagctgaacaagccgcaaaagaagcagcaaaacaaggtcaagatatagtgatagttaatcctagcagtcctataggaccattggatattaaacccacacccaccggagatattattctgcggtttttgcgacgacaaatgccggcttatgtggatacaggtttaaactttattgatgtgcgagatgtagcaagaggacatttactagctttagaaaaaggaaaaacaggcgatcgctatattctcggacatcaaaatctcagtctcaaacaactgctagaaatactatccgaaattacaggaataaaagcaccgcaaatatcagttcccgcttttttaccattgagtgttgcttggatagaagagaaaattcttgcacctatgggaaaaacccccacagttcctatagatggtgttcgcatggcacagcaaccaatgtattatgatgcttccaaggccatccgcgaacttagtctacctcagtcttctctgaaggtagcactcaaggacgctgttgattggtttgttgctaatggttatgtcaaataagttcgtagtcagcacttaagtgctgactacaaacgatgaggtgttatcaagagaggagaatagttaaatggcgattaatgtacaacaagctatagacattggtaagtatttagtgacgcaacgtctgttaggacgtaaacgcttccctctggttttaatgttagaacctttatttagatgtaacttagcttgttctggttgtggaaaaatccaacatcctacagaagttctcaaacaaaatttgaccccagaacagtgttttgcagctgtggaagaatgtggcgcacctgtggtttctattcctggaggagaaccgttattacatccacaaattgatgaaattgttaaaggtttagtagaacgcaagaaatatgtttacttgtgtaccaatggtttgttgttagaaaagagtctccataaatttcaaccttctccttatctaactttcagtgttcatcttgatggaatgcgggaatggcatgataaatgtgtagacagaaaaggcgtttttgatgttgctgtgcaagcgatccgcgctgctaaatctcaaggttttcgtgtgactacaaactcgactatttttgaaggttgtgatgtcaaagaaatgcaggaattttttgattttctcgatactttaaaagttgatggaatgatgatttcccctggttacagttatgaatgggcaccagatcaagatcattttctgcaaaaagaacaaacccgcgctttatttagagaaattcttgcaccttacacatctgggaagaaaaactggaactttaatcacaacccattatttttagattttctcattggagaaaaagactatgaatgtactccttggggtagtcctagttatagtgttttgggttggcaaaaaccttgttatttgttgaatgaaggttattatcaaactttccaagaattgttagatgagactgattggagtaagtacggacgcgctagtggtaatcctaaatgtgctgattgtatggtgcattgtggttatgaaccaaccgcagcgatggatgcgatgcaaccgcaaaatatagctcgttctttgactactgtttttggtagatgataagttgagaatgtcagaatcaggatgaataagattataggatttacaggatgaaggatgaatttattaatactgaatcttgttaatctgaaaaaatagtcaatcctgattttgacaatagaaattttatgaatcagtttatgaatcagaattaggagcattaaaggagcaatatgataaaataagaaaggatgcacaggatgaaaaaacaggaataccatgaagacccaagaactccaaattttacaaactctttatggacaagatttttttgcttgggtagaacagaccgcagaaattttgcgatcgcaacagtgggaagcattagatttagaaaatttaattgaggaagtggtagatttgggtaagagtcaacagcgagcgttacagagtgctttaaggttggtgttatcacacctgctaaagtggaaatatcagcctgaacgtcgtagtaaaagttggcaagtaaccattacccgtgaacgattgaatttagatgaattattggcagaaagtcccagtttacgacggtttttaactgatgatgaatggataaacgctacttatcaaagagcgcgaaaagaggcaatggtcgaaactggtttatcagaggagaaatttgcgatcgcttgtccttttgctctcaatcaaattttagacctagacttttatcctcactctgacgaataattacttaaaaaatcagttacatatatatctgaaaacctacacaatctccaaaaatgacagaagctaaaaacgtactcggtacaaaattagaactttgctgcacatctcccatgactggatattaccgcgatggtttttgtaacacaggagggcaagattttgggatgcacgttgtttgcgctcaagtaacagcagaatttttagaatatacaaaatcccaaggcaatgatttaagcacacctgtaccttattttaattttcctggtttaaaacctggagattgttggtgtttatgtgctgccagatggcaagaagctttagaagcgggtgttgcacctgctgttgttttggaagctacccactctagagctttggaagtttgtaatttagaagatttacaaaagcatcgggtaattcgtaattagctttttttccattcaatagatatagatccccaacctctttgatctttgaaaagtcggggatcaggttattatttaattaggggttgctgagaaagtctttccgtgagggcataggagtcaggagtcaggagtcaggagtcaggaggagatttgaaaatttctttgccatctcttgaaatcccaaaaaatgcacactttttccggtatacccttcaaaacccttgcactaatttctgtgtttatcagcctctaacctttgatatatcaaggttttaggtactatgatcctcaaaaagcttgcactttgtgagtgtttgcagaatttcaaaataaaaaaaactccttgaactcctgactccttgatagcgacttgtactgagcctgtcaaagtaagcgtggcgttaaccatactcctggcccctcacagataactttttcagcaaaccctacttaactaataccaaatacagaaccaacggtagacttaattgaatttccagcatcctttaaagtctgagtaattgggtgtttggactgcaaaaatactctcgcacaattacgtcctggcattcctgaaattgaaccaccgggatgagtacctgcacctgttaaaaacaggttatcaatgggagttttataatttgctaattctggtaaaggtctaaaaaataccatttgatctaatgtcatatcaatatggtaataattgcctttataagcccctaatctttctcctaattctgctggactttctacccttctagcgatagttgcatttttcacattgggagcgtaagttgctagtttatcaactactttatctgcaactttatttttcaattcatcagtccaacctgtaccttttaaacctgtaccttctgctccagaaatttgataaggggcaaaaaattcaatccaaactgtatgttttcctggtggtgctaaagtccgatcaagaaagctaggcatcactaaatacattgagggatcactatcaggaatttctccgattgtacatttactatgcgcctgttctacatgattcatggaatctgcaattaaaattgaaccaatgagatattcgtctttatgttcatggtaaggaaaacgcaagggttcatctaatgctaaatctatctttaagatagtttcattattattaactatgcgcctttctaatctgtctcgtaattctggatcagcatcatctacttcttgagcatctatcaattgtaaaaataatcttttggcatcaatattagaaattactccatattttgcccgatattcttcaccattggcaacccgtacacctacggctttaccatcatcaattaagactttttctacttgctgatctgtgagaatttcgccgccttttgctgttaccaaatttactaatgctttgactaatgcacctgttcctccacggggtctagtcattcctggatgatgacgcatagacatcatcattacacctatagccaggtttttctgtgatggtggcgctcctagttctgatgctagtctagaaagtggtgctttgagaaattcttcatcaaaccattcatttaaaatatcttctgcactggtgagcattgttcgcacaaaatctaaacttttttgggtagaaccaatgacagaaaataaatctttgaatttttgcaggttgtagttaccgaatatatctataattgatttgggtggagcgttgaacatgggcatcatggcgttaattgcccgttgccaataatgtgtaaactcggcatattttttagcatctctttcattatacctggctatttctgcacaggttttttctaatgatttatgggctaaaaaatatttcccatcgggatggggacaaaaaacaactgggtcacattctagatattctaatccatatttttctagttctaattcctgaacaactggaccgagatgaataaattcatggtcaatagcacagaggttaaatttaaaccctggtgctttgtctgggatacattcttctgttgtggccgcaccaccgggaacagaacgtttttctagtagcaggacgctataacctgctttgagtaaataagcagcacacactaaaccattgtgtcctgcgccaataattacaacatcatattctttcatgttttttatttgatcataaacttctataaggagtcaggagtcgtaggggcaaagtaggagcgttttgtaggattctgtattttgaatcctcactgggaatataagactgctgtgcaacttaattaagattttgtaaggtttcttctgaaggaagttgtttaacatgggctgcgagcatgagtattaattgaccctttttgacttgcatatctttaatataaaatatcatatcttcccattcaaagtatggtaaattgagaatttctttaactttttgcatggctgcggtaattaattctattctaattccttcaccttgggtacaacgaaaactctctaacatggcaggttttgtttgggtgcggggatgagctatagcatgatatcctaaaatgtgactgtttccctgttctttgagccaaattttaccttgaaattctaaggtctcatcagcaggtagaaaaacctgcatttcttggggttcaaatttgacaacttttccatctacatctagctggaatttttgcactaagctgcgaattatttctgaagttaaagctaagttaatatcagtttcttccatgacaacatgggcgatcgcatttactggttcattaagtttaatctgcccaaatatggcactaaaaggattgacagcaatgctatctgtttgcagtttaatttcttgaacacggattttttctttaatcactaatccttgaccagctatagcaaccccgtctacttttccctgaattattttaccaatatctgtttgtatgtctacatctattttttctgattcatctaattcttcagttaatctgctttgggctgcctgagctaataatttttcttcaaactttttttgtacaaacggctgttcaggcataaaaatttttattctcacaatgtgttattacttgctaatctagcctctgaatcatcaaaagagtatctatagtcagacataaactcattagtagatttaatcaaggagtcaggagtcaggagtaggggtttagcactgctaaacccttacaggattcaggagtcaggatcaagaatattcattcctattctctgttccctctttactgtcacctgtcacctacttaaaactacggcttttgtggggtgggcatcctgctcgccctagttgtgctttatagttacttatagaattagaaagtcaagaaccagattttaacctatgtcgtgtagtagatcgagaagaaagaactgatgtgccagatcaaacaattacaaaaatagtccgtcgtggttttcgttggggtgaaaaaattatccgtccgacagaagtaattacggcgaagcctgtcgtctaatggcgagtctgcgaatgtagaatcccctcgcctttaggcaggggagtgtcaatggtatgggttcgtacagaaccaaaattactaataattataccttgagagtcacaatcatcaaaatactatgaagccgcaagaaagtaatattacagaaacttccacatctgcaaaaacatggcgtggttggcaagaaaacctgactttaatagcgatcgcactaactttagcattactaatcaggacatttatcgccgaaccccgattaataccatcagaatcaatgtaccccaccttacacataggcgatcgcttagtagtggaaaaagtatcttaccgttttcatcctcccgaaacaggcgatattgtcgtttttcaaacaccaccagaattacaacgtcgtggatatgacaaaaaccaagcctttatcaagcgtattattggtaggccaggagaggtaattagtgtagcgaatggtaaagtttacctcaacggtcagcctttacaagaagattacattgccgaaccaccaaatcagccatttccaaccgtaaaaatcccagaagatgaatttttcgtgatgggagacaaccgcaacgatagtaatgactcccgatactggggctttttacctcagcaaaatctcattggccgtgctacctttcgcttctggcctttagaccgtatcgggttaattttgtgattggggactggtgactggggactggtgactggggactggtgactggtgactggggactggggactggggaagaaaattttagattttagattttagattttagattggagatcacaaaaacaatccaaaatccaaaatccaaaatccaaaatccaaaataaaaaactcctgccttctgcctcctgccttctgcctcctgcctcctgcctcctacctcctacctaaaaccgcagataatacattaattgagcgatcgcctcacctgacagtcctaaccgttgctgaaaatcaaccaagttacggtaataaccagcagtgaggcgattttgcactaccgcttcagctagagacaaatctatcaatggaattttcgccagactctctaccgttgcggtattgggatttacttgcgtagtattagcgagagatccatcatcatagtagctaaaatttaacagtggtttcagtggttctagcctttgtacaggaacactcaaagccgctgctatatcttcaatacaataaaatttaacacctgaacgtgatagttctacgagcgatcgcccttgatgaatagataaccctggtaaacgtagccaatcatctacagtcgcttgattagcatcaatacgcatccccagttgtgcggccatctgaatttctgccccagattgtagacgataatagggatcattgagcagtttagctcggagtttttgtaatttgagatttaaaggtagccagtttatcatggtattgtaaaacttcgccgaatttatagacaaatattaattacatcaagaaatctggtctaacatctgacggcgcttttgctcaaattcatactcagaaattaagccatcttggcgcaaagcatctaactcacgtaaggcattagctaccgattctacttgattactgacctgtggtgaaactttaactgccgacttcccaaaattaaagtttcggtcaaaagcttcttcatcttgcgctaaataccaaaccccttctatagcactagctactttgggaattggtgtccaagataacaatacatacaaaattccccataatggctgtcccaagtaaaatttatgtaaacctgaaattgttagtgtgccagaaaaggctaaaatagcagcaatgcttctactcttccgtttcgttaatatcatccttctcaagctccaactactaaaattataaaaatcagacatctataatagtaaattactaaattcctggaatcaattgatcaagttatctgtgagggtccagaagtatggttacgcatcctcaatcccttgatttttttcagatttattcaacaacccctaattagcgatcgctctcccattggagtcatcccacaaaatcgcattgctcccgaaattacctaactcacactcacagattttttactgtaatattcattttctgcatacacactaattacagtatcaccaactacgaaaaatgtcccttcttgctcagatttggaaaactgcaaatcaggatatttactactaatttcatccgcagtcatcgcttgagtgttcatgtcatcaggtaacaaacccgtcgcaccaatataaaatactaaaggtgaaattttctctcgataaactttttctgtataactctctaacttctgttttgctgttgtcatcccgtcgataatttcctgtttatccacaggtgtacctgcgtgttttgcttgtagtaataaagccaaaattccagcaccaaccaagtttaaaatttttgcaaatttacccgttgtttctattcccagaaaatcatcaaaaacagctttcattaaatcatctgcttttgtaaatttattcctagaagcaacagctttactacgaaaagcaatattttcctgaaaagctaattcaaaagttggtttcttgaaaatttccccagtttctgaatcataaacttcatatcttttatcaagaaattgattagcagaagacaatttattaaaattcacaatttctaaactgccaatatcaatcttataactcacccttgaatctacagtaccatcagataaagctgctttcaaatctgtatattcgttagtggtgggaaaattcagatacagacttttagaaagataatgttttttcaattcttcaatttgtgcaggaataaatacatctgactcttcccgtaaatgagcagataaaatactcgttaaagttttaatttctgccagttgagtaaataaaccttccacactgctataattaccttcaaaactgactaaaggtaaatctgctaattgcaaagtatattctttttgaaaatcaaattcctccctatcaataacccctaccgcttgcaattcatcaaatgcttttttactgctaattttcacttttaaagtcttaacattaatttctccatcactgacaatggtataattattaaaagtcgttaaatcatttaataacacacctgcaacttcagtaattggggttttatcttccgcttttaccagcttcactttttgcgtaagcagcatattaatagttgcggtattgcggttaatatcaaaagttcccatctgcacataatcacctggttcaatatattctatttctaaccaaggtttgattaattctccattttctccccttgtaccattaacccgcttaataccctttctttgataagtttctttcagatgtttgaggttaataatgatatgttgatgatgttttgataaaatatcaatcaatgccaaaacggaaattttatcattaactttgacataatctaaaatttcatgttcagctaaaacatgaggataaaaaatggcaatttctaaatctttggtaaaatcagcaatgtcttcattagttaaagcttttgcgtgtcttgcggttaaggttgcattgaaggtactcgcaagcgcgtatttcgcagtattcaaatttccatcagctaaatttgccttagcaaaaatataaacagatggatcattttgtgccaccggaacatctgttaattgttcataagctgctttggtaatttgcttatatttatagatgtaagcttcgtcttctggttttaaaccaaaaacttttaatgtttggtttgtaccattaattttttcagcagtgggagaaaagaaaacttgataactgtagtcactagctaaggtttcttctatgactattcccgtcgcttcttttaacacatttacagtgttataaagagcatcataaacttccttaatattcccagcttggatacaaacaccagaaacagaattagcgattttagcgaggaatttaaaatcagaagaggaagaataagcaatggtgttaacaaaaacttccttgtttttcaaatcattacaaattccctctattgccttagattcagaattaaaactgctatcattagcatagccatcactgtgtaaagtaattgcagttaattcatcaggatgaatcaattcattagctaatttcaaagattgagaaatacaagttaaataagtagcacgaatagctttgatatcagccatgtaatctaaatctggctgcattacctcctgaatcggtacacgctgaaaatgacaggttaagtcacctttggaagaataggaaatcaacgttaccactaattctgagttgctgtattcatccagtgtcaaaagtttgattaatgtttcttttaaagcctcaatatcataatacattgaaccggaacgatcaataatcatgatactatgagcaatcatttttttaggaatagcatcaggcttaatttccagttttattttctcagttaaataaaaagctttttccttacctgcgagattataaacagcaaacttggttttttgacttgtcataattttgccgatggtaattttacaaggaatattgtccaggatcaatcacaggataaattaatttatacctgattggggtgatgttgtaatatgttgtaaagaatctaattagagatgttttgattgtttctatatcatatatagtacataaatactataaaaatgtcaaggtcagggtaaaaatctttatatttcttaatttttgcttgtcagcaaagtgagaaatgttttactaaatatcttaaatgtaatgatgctaactaaaactgcatttagatacccgacttctttgataaattaacattctttaccaaagattcaattaggaagtcgggtatctttcgtttgtgttataataaaaatccgacataattaacctgccagaaaactatagcaatgacaaacaaaaccatgaaaaataaagaattttatgtagtaattaaaagagatgaagatggtatgtatattggtgaagtgcctcaactgaaagcctgttatagtcaaggagaaaccattgatgaattgatcactaatattaaagaagtaattgaaatgtgtttagaggaattagaagaagagtcaataacagaatttataggagtaagcaaagtagttttatcatcactaaattaccagcaattacaggagaagaattaattaccgcattacaaaaaataggtttttatatagtgagacaaaaaggtagtcatgtcagaatgaaacatcaagatgatcgagttgtttctattccttgtcatagtggtaaaaccattggtaaaggtctattattaaaaataatgcgagatgtagatttaacaaaagatgaactaatcgaacttttagactgacacctaattaaagtatctgcgtttaattttgccaatcctaatttattcagtacaaacaaactacccaaatatcaagttaagatcaaggagactttacacttcttaactctgagggatatggcgcgagatttacggggatttattaaaattctggaagaaagaggacaattaaagcgaatttcggctttagtagactctgaactagaaattgcggaaatttctaaccgaatgctgcaaaaaggtggtccaggtttaatctttgaaaatgtcaaaggtgcatctttccccgttgcagtgaatttgatggggacggtggaaaggatatgctgggctatgaacatggaaaaaccagaggagttggaaactttggggaggaagttaagtatgcttcagcaacccaaacccccgaaaaagatttcccaagcgatagactttggtaaggtgctgtttgatgttgtcaaagcgaaaccgggaagggattttttccctgcttgtcaacaggtggttgtggaaggtgatgatttagatttaactaagttgcctttaatacgtccttatccgggagatgccggaaagataattacactgggattggtaattaccaaggattgtgaaacaggtactcctaatgtgggtgtgtatcgcctacaactgcaatctgaaaacaccatgaccgtacactggttatcggtgcggggtggtgcgagacatttacgcaaagcggcagaacgtggtaaaaaattagaagtggcgatcgcccttggagtcgatcctttaatcattatggcagcagccacacccattcccgtagatttatcagaatggttatttgcgggactttatggcggttctggggtacaattagccaagtgtaaaacagtagatttagaagtacccgcagattcagaatttgttttagaaggaactatcaccccaggggaagttttacccgacggtccctttggcgatcacatgggatattatggcggtgtggaagattcgcctttagtgcggtttcagtgtatgacacaccgcaaagacccgatttatcttaccacctttagcggtcgtccacccaaagaagaagcaatgatggcgatcgcccttaaccgcatctataccccaattttacggcaacaagtatcagaaatagttgacttcttcctgccaatggaagcattaagttacaaagcagcaattatttctattgataaagcataccctggacaagcaagacgagcagctttagctttttggagtgccttaccccaattcacatatactaaatttgtgatagttgtggataaagatatcaacattcgtgatccgcgtcaagttgtctgggcaattagttccaaagttgacccaaccagggatgtatttatattaccaaataccccctttgacaccttagattttgcgagtgaaaaacttggtttaggggggagaatgggcatagatgcaaccaccaaaattcccccagaaacagaacatgaatggggcgcacctttagaatctgatcctgatgttgccgcaatggtagaaagacgctgggcagaatacggattagcagatttaaaactaggagaagttgaccccaatttgtttggttatgatatgagatagctgactggggacagaaggcaggaggcaggaggcaggggaagatgaataaccccaatgcctaatgcccaatgccctacatccttttagatatcatccttgcatcccaggtatagaaaccaatttggttaggaactctagaaaatctacctgtgcgatgacctctagataattcattgagaaccttattttttacctctctcatgtcccgatcatcaagttctccatagataccattaatgacttcattcacaccaaaaacccgccctctatgttcacctaaaaaagatgtcaaagcatcaattaaaaattgaccctcatattttttgagcatgggaatatcattggagtgtgttacagccacaggcttttttcttctacttttactacgagtagatgagccattatgatgattgggatctaacaaacttaaagccagagtataacaaccaggttcgttaggaatagccgaccaataacccctttctctaccttgagtcagagaagattgaaccctacctttgacgattttaaagatagtagattctaactcaccatagagcgatcgcacaataaaatctatatggcaaacagtcccagcatattcatgcaataaaatccttaaagcttccattcgactcaaggatttatattcaggaagcatgggaatttctgcccccttcgtaaaatgttcataactatccccagacgtatttctcagatcagaaactgcaaatttcctaaccccattacttgaaccatttgttttccattcttgagagtgagaaggttctgactctacagactccaacaagtctaaatcagactgatgatctgatgctaaaaataaacgagaactttgttgatcaccagttgctaattctgaaattcgttcctgttcatcaccataggaccaaggagataataaagcttctacatgatccaattgcgatcgcgcttcaataaatagccgttggtactcttgtgccagaccagcataatagtctcgtaattccaacaatggtctaataaatacctctgaaggaggttgtaattgttcttggttgttcatattacttcaattattctaattcaatgtcacttttgtaattcatcgcatgaggcttgagttttctaggatcatgagcagattttttcggaggttgaggaggacggcaactttcacaatataaaggtctaggtccaaaggtttcccgttttgtcgcttgattacattctttacaaacaaaatgaaaaacacgagtgtgaatctgtcttttatgcgctctaacagtatattctctcacatcaatgatcttggtagccataatttaagaattgcccagttctgtactcttaatatagctattcaagcaaacaaaacaatttcagtgtgtgttttactgcaagttttattcaaatccttaaaataaagtcaaataggataaacatttgtatagttaagaataaacagcaaagccatctcaacttctgagattgtgccgctaatctcccctttcctgaagatgacatttgatatttaatttaagtctttctatttgttcatctctatctactgatcatctggataactttgcataaatttgatagtcaaaccatcctcctcatggatgaaatcacctaatgaatttgttcatctgttgtaatttatgattcattagggcttgctgaataaatgtgaaaatattacaagtaaagggtcttagcctgctggaagttaaaaaagtgcaagactttacgaggtgggatctcaaaaaccttgcatttaatttctacacaaaggaaaaatcgctctcatcgaactcttcaaactgttccctgtctccacgacaagactttttcagcaaaccctatttattttgtttgagaaatagatccctaacttgtggtcggggatctccttgatcttctgactcctgactccttgatatcctatgattgggactccacaaaatcagcatcaatcacatcttcaccccgaccaccttgtgcttctcgactgcttccatcaggacttacatctggtcttcccgcttgggcataaaccgcactaccaatttgcatcaaaatttgctgtaattcactgctaagagacttgatccgatcaaaattatcttgattgatagcttcccgcaaatctttgactaactcatcaactcgacttctatcaccagcactgactttatcacccaagtctctgagttctttttcagcttgataaactaaagaatcagctaaattcttagtatcaatttgttcacgtctttttctatcttcctgtgcatgagcttccgcatcccgcaccattttttctacatctcgtttatcaagagtagaagcaccagtaatagaaattgactgctgtttattagtggctttatccttagcggtcacggaaagaataccattagcatcaatatcaaaggtaacttcaatttgtggtacacctctgggtgctggaggaataccatctaaacggaaagtacccaaacttttattatcttttgctaactctctttcaccttgtaaaacgtgaatttccacattactttgaccatcagccgcagtagaaaaaatctccgatttcttcacaggaatagttgtattacggccaatgattttagtcatcacacctcccagagtttccacacctaaagataaaggagtgacatcaagcagtaaaatatctttaacttcacctgataaaacacccgcttgaatagcagcacctaccgctacaacttcatcaggattcacaccttgacagggatctttacctgtcattcttctcactaattcttgcacagcaggaatacgagtagaaccaccaactaaaacaatttcatcaagttgggcatttgtcagttttgcgtcttgcaatgcttgttgtactggttgacgacaacgatctaaaagatccgccgtcatctcctcaaacttagcccttgttaatgtcatatccaaatgtttaggacctgcttgggtagccgtaataaagggcaaattgatattagtttgagtggcgctagaaagttcaatttttgccttttctgctgcttccgttaatctttgtaatgcctgtttatctttccttaaatcaataccttcattagtttgaaattcatgtgctaaccaatcaacaatctttttatcaaagtcatcaccacctaaatgagtatccccactggtagatttaacttcaaacacaccatccccaacttccaaaatagaaacatcaaaagtaccgccaccaaggtcaaatactaaaatagtttcattttgtttcttatccaaaccataagctaatgctgctgctgttggttcattgataatgcggagaacttctaaaccagcaattttacctgcatctttagtagcttggcgttgggaatcattaaaataagcaggaacagtaattactgcttgagtaactttttctcctaaatatttactagcatcatcaactaactttctcagaacttgggcagaaatttcttctggtgcaaattgtttattaactgcgggacaactgagttttacattaccattactatcacgcagtgtcctataggaaacttccgttgcttcatgggtaatttcttcatgtttgcgaccaatgaaccttttcacagaataaaaagtattttctgggttcattaccgcttgtcgtctagcaatttgacctaccaaacgttcaccagttttagtgtaagctaccacagaaggagtgatgcgttgaccttcagaattagctattactaaaggttgcccaccttccatcacagcaacacaagaattagtagttcctaaatcaattcctactacctttgccatagtttccccctggacttgagtagaagtttttcagaagtgctattctctcgttcccagtctgagactgggaatgctattacagagtctctgactctgctatcactaaaggcagaaatttcaataattcattcccatacaaagtatgggaacgagaaaatgagatgtaaactgaatgtgggatgggcatcttgcccgtcacaggctagaagtctgtgccacaggtgttcatatctcaaatgaaaatgctatagctgactgcttatagctaatagcttaaaaattaaccgagattaactttgaaagctttttgtttttcaggttctgttttcggcaagttcaaacgcaaaataccatctttatattctgcttgaacttcttcatgtttgacagtagaaggtaaaggaattatcctttgaaacttaccataacgaaattctgaacgagtgtaaccttctctttcagttgtggtttcagacttcctttcaccagtaatagaaacagcttcaggagttacttcaacattcacatctttggcttctaaaccaggcagttctaatttcaatttataggcatcatcagtttcttcgagttcagcagcagggataaaagttaaccctcctctttcacctccatcacctggtatcattctttcaaacaaacgattcatccgcctttgtaaagtatcaatttcgcggaaaggatcccaacgttcaagttcgcggaagggttctaaacgttcaagatcgcggatagggtcccaacgaactaatgccataactatctcctatacaatgctgtatttggcttgcggaggcttaattttcagcttcacagatggcaaacaatactcgtatatttttttaattttttattgcgtgaagctttatcttttgcttcctaattaaacaataacaccaagatttaaatttagtaggttcggttttatagctatagaaatcgcaatagccgtacctgctacattgtttcacaatttgttacaagtatgtccataaaaaatgcaccttatgttagttgtaaatatctcaacattaccctcagttatcaattgacaattgacaattgataattgataattaattgtttaattccagctttaaaacctctcttttccatggaaaaagccaaaaatgccgcttttttaagcctcttcctttaaggaagaggtaattgtccattattgaaggctatgcagcagtcaaacttctatcaaaaaaacaaaaaataaaaatccctcttaggtagagttataaagtaaaaaaaatatattcattctaacttatgagatatattgagatatatattgtagtaaaactttttcatgttcacgaataaaaaagtgatcaccagaaaacttatgtaaagaaaaagctgctgtcgtctgttcttgccatgcttctaattcataatcagtaaatgcgggatcttgcagtccaccaaaaacactaatgggaaaatcaaaaggtggttgatgggtgtaaacataagtttctaaaactgtaaaatcagcccggagaataggcagaaaaagttggatcaattcttcatttcctatgacaccatcaggagtaccattaaaattgcaaattgcttgccaaaattcatcatctggtaaattgtaaatttttctttttgtgggtgtaacttggggagcattgcgagcagaaacaaataaatgtaatggtgttaaattataatctgagcgcagtaaacgagctaattcaaaaccaacgagtccacccatactatgtccaaaaatagcaaagggtttatctaaaaatgggatgagatttttcgctatttcttcaactaaaggctgcatttttgtgtagggaggaaatttcatttgttttcccctaccaggaatttctataggacagacttcaatggttgggggtaaatgactaggccaggtgcgaaatattatggcgctacctcctgcgtagggtaagcaaaataggcgcatttttgcttgggggttgggttggggaaaggttgttgttcccattttcctgtattgttatttttctcggttttaggatatcaggaaagggatgttttttctcacgcagaggcgctgaggaggaggaaaaatacacaaaaatataattttatgtaggtgtaattcatgaattatccctacacgaataaaacttcttaaaaatcaactccccgcttcaattccacaccttgattagcataatgtttatgacaataaacctcagaatgaatacttgctaaatcaaaataagcaggttgattttgacaacgaccagtaataataacttccgtatcttttggtttacgcagcaaagcctgtacaattggttcaacagggagtaattctaaatcaacggtgggattaagttcatcgaggatgatagttttatacacaccagaagcgatcgctgttttggcaatttcccaacctctttccgcttctacataatctaattcttgccgagaattacgccacacgatcgcatcccttccacagcgtaaatgatccactacttcaggataagactgctgcaaagcggcgatcgctgcatcttcagtatatccactaccacccttcaaccactgcataattaatacacgggtagaaccaggatgattaatccccctacctattgcctgtaaagccttgcctaaagcactagtagacttacctttgccagcgccagtataaatttctataccttcaatcaataattctttggctgtggggtggtgttggggtttcatttccgagtgcagatctgcaatatccagtaattgttgcggtgctgcccgacctgtggtaataatttctaattcctggggtttagattttaaagtgtttaccacctcatccacaggaagcaaacccaaatctaaaacagggttaatttcatctaaaaccacaacagaatataaaccagaggcgatcgcacctttagctacatcccaaccccgtgctgcttctgcgcgatcaaaaggggtaatttcatcatggccgaaatattccgctctaccagtgcgaacctgatcaattaaatggggaaaaccacgctgcaaagcggcgatcgctccatcctcatcataatcacgttctggacccttcaaaaaccgcaacagtaacacacgatcaaaattactctcagcattgatacctagcccaatagagcgcagaaccacccctaaagctgcttgggacttacctttacccgcaccatcataaacatgaatttgacccgtgaggcgttcagaacgcgcttgtgctgtgcgaataccgatgccatttcttgtcatttttggaaaactttaaaaaagctgtaacgtggctgtttctgatcttaccgaacctcaggaagtattaccaactaattcaccaacagtcagcagtcagtagtcaaaacctaaaacccacgtaggtaaattttgtctgtgtagccacgacttcgactccctggcacaattagagaaaaaatggtcaaaaaaatgagataatttcccccatcatccgtataatctcagttatctttcatggtacatcaagaaattgattcattcaatgttatactcaatcctacgtttttaaacgtggtttcctcctgcctcctatctcctgcgtcctgaaaaatttcaaactttatcatttatagaagctttatgtcagacgaattaacattaccgagaattttaccccttggggcaattttgtttgaaactttatttttactaattgccattcccctagaagggtaccttctcaatagatcactcaaatttgacaaaaaaaccagcattttttacgccatagctatgaacgttttttccagtgtcattggctggaatgtattttttatggtcgaaccaatattagctgtaggtatcaagtcagaattgattagttatatattttttaatacctttaaaagcgccagcatacagaattctctaattctcattggctttctggttttctttggtacatttttagtcaagtttgcattgttaaaactgttgattattaccttagatgaagggggtaaaaaacaagaaagcacagacaccactcagcgccaaaaaatccttattagcgaaagaattaaattacaaaataccagcttaattactactactttaatcgccaattccttgagttataccgctatttcattaattttagtcattcgtggttttgtgattaggaattaaattgagaaattgagaaactaagtgaaaacatcagccaggtaaaaatagctaaaaataggtgcaaatatgaattcatcattgtttaaagaagtaatacagctatttaaatttgttcaagatttatttttgggcattcaaaaacttgtcatgcctcccaaagctttttcttggcagacatttatctatttaagccttttcgcgtgggtaaattcatattttgccacaggactaatcaaagatataattgccttaacaggttggggatttttaattgcaggtacagcttggtataccaccgatggtcctgcaagagttccaggaacttttatgccagtaggtgcattaatcactgggtttttagtcagtatatttgcttttggacatcaggaaaatgtagttacacctagaactatagttctttggccgacaattgcagctataattaccgccatcccagaatttttctcaggaacaggtacatcaacaaaagctacccttcccaagttagaagcacgccaaaaaatcattattttacttgcttggtcgatgttgataagttgctggattcagttttactttgttatagataaatggttaaaagaatatcccagtttatccgcagataattttcaacgcagcgcctttgtaattaaactagaaccaaaatcaaaaagaccagaaaacggtaatatgattttaaataaaattcaaccgctaatagaagaacaaatatccagaagaacttggtcagaagtagaaagatggttactagaagctaaccaacaagtaggcaatttgggtaaaagaatgattaaccaaaacctcagcgaatacgaagaaaaaggactctggaaaatagaaccgcgtgtagttaatatcaaatctggttacagattagatattctgagtatttggcaaggaccaactgctaatggtaggggattttatctgcaaaaatcttgtcaaattcagccagtatcaactgttaaaagtccagaaaataaaaatgcagtagcatccattaaatgcgaacgcaacagcagatttttccttggttcaccaccaccacaacagtagatttatttatcaattaccaattaccaattaccaattacccattaccaaaaaatatgaacgcagtcagaacatttgtaatggcaaaaaacgtatttcaggaagtgatacgcgatcgcatcctgtacattatcggtttttatgcaattatcctcgctgttgccaaccgggcaatttttgaatttgcagctacaacccaagacaaaatctttttagatgtgggtttagcagtaatgaatgtcattggtttaattgttgcagtctttattggcacaggacttgtcaacaaagaaattgaaaaacggactattttcatgttaattgctaaacctatcagccgtagtgaatttatcaccagtaaatacttaggtttatcaggtgtgttgggtgtacttctagcatccatgacatttatttatttggtatttttgcaacttggtaaaatgtcctatcccctacccagcattcttttagccatacttttcttatttttacaattaactttaattacggctgtagctgtcacattaggagtttttaccagttccttaatagccacagctttaacatttgccgtctatttaatgggcaatattaccaaagatttagtcgcattaggtcgcctcagtgaaaacactgcggtagaaagaattacccaaggtttatatctcatactcccagatttatctcgcttagatttaaaaaatgatgccgtttatggactgcaagcaataccggatactataacactattaagtaatgctggttatggcttactttacagtttcatgttgttggcgatcgccattttgatcttcttgaaaaaagagttttaaaggtgattggtgactggtgattggtgattggtgactggtgattggtgattggtgattgggtagtaattgataatcatgaatcatcaattatcaattatcaattgtcaattatctccccaggtttgtaactgcaaataaactaacaccaaagtcaccactaataacacagtagcaactgcggcggcgtaaccaaaatcaaattgaccaaaagcttcttgataagtgtaataaactaacaaattagtagaatttaaaggaccgcctcctgtaatcacataaacaggttcaaaacttcgtaatgtaaaaattcccgtggtgacagtcgcaaagattaaagtaggtcttaatcctggtaaagtaatatgccaaaatttctgccaaccatttgcaccatctaattctgctgcgtcataaagactaggaggaatagcttgcaacccagccaaaaaaaccaccatattaaaacctatttgtttccaaatactaaataaaattatcacaggcattgcccaaaaagtatcacctaaccaagatatgggtgcaacaccaaaaaaatctaaaaatccattcacaggaccagtattttgaaacaaccaacgaaaacctaaaccagccgcaaccagtgagataatagaagggagaaaataggcacttcgcaaaagtccccgcaaagctaaagaacgatctaataataccgctaatcccaaaggaatcaccaaactgggaacaagactaccaaaagtaaaataaacagtgttaaacagaacttgccaaaaatcagagtttagcaacaaccgccaataatttttaaaacctacccaataaatacccgatgaagtaaaactaccagcagtaaaactgagataaaacaaataggcaataggccaaattataaataaacctaacaaaatcagtgctggtgtgagaaaaacccaagccgcagcagtatcattatctagtagttccgaaggagaaaaacgggatggtttcatgataatcttagacattcacagtatattcataattttatgagagtttatgagtcaatattaccccattgatggcacacctagtctagtttctcctgatatttctctggaaaattcacaacctagcaacgttttgaaactgggagtaatggcttcaggaaatggtagcaattttgaagtagttgcccaagctatccaagcagggaaactcaacgcccaaattcaagttttaatttacaataatcccacagcaaaagccgcagaaagggcagcaaatcacggagtaaaggctgtattattaaatcatcgtgactataaaaagcgcgaagatttagacagagaaattgtcaaaacttttaatcaacatgatgtagaattagtgattatggctggctggatgcgtttggtaacacaggaattaattgatgcttttcctgataaaattattaatattcatcccagcttgttaccgagtttcaaaggtgtgcgggccgtagaacaagcattagaaaccggagttaaaataactggttgtactgtacatttactgcgtttagaaatggatagcggaccaatcatcatgcaggccgcagtcccagtattaccaaatgatacagcagaaaccctacacgcaagaatccaaattcaggaacaccgtattttaccattagccattgcttccctcgctgacaggtgacaggtgacagttgacagttgacagttgacaggtgacagttgacagggggaattatattttaccaattaccaattaccaatcaccaatcaccaatcaccaatcaccgctataaatgctacaatcctctgttagaaaattttaggatatctccatgtcagttttaactaaccccataaagtttggtactgatggctggcggggtgttatcggtgatgaatttacctttgaacgcctagctatagttgccccagtcgcagctaaagtattatataatacctactattccacagtcagtagccgtaccatcattgtcggttacgatcgccgttttatggcagaaaattttgcccgtgttgtcgctgatgctgtcaaagccgttggttttgatgtcctgtttagcgaaacctacgcacccactcccgcttttagttgggctgcaaaagacctcaatgctttaggcgctttagtcatcaccgctagtcataatcctggatcatatttaggtttaaaagtcaagagtgcttttggtggttctgtgcctccagaagttaccaaagaaatagaagcactattaacagaagcagtaccaaccgcaacaactccgggcaaagaagagacatttgatccctggcctagttattgtcaagcattagaaaaaaaagtaaatattgacaaaattcgtcaagcaatatcatcaggtaaattaacattatttgccgatgtcatgcacggtgcggctgctagtggtttgggtagattattaggtgaaaaagttaaagaaattaacagcaaccgagatcctttatttgcaggaggtgcgcccgaacctttaccaaaatatctttcccttttatttacagaaatcaaaaatcatggggaagaaaataacaataataactcaggtttaacagtaggtttagtatttgatggagattgcgatcgcattgccgcagtagataaaaatgctaatttcctcagttcgcaaatcttaattcccatcttaatagatcacctcaaaaccagacgcaattttacaggggaaatcgttaaaaccgttagcggttctgatttaattccccgtgttgcgaacttattgaatttacctgtatttgaaaccgccgttggttataaatacattgccgatagaatgttagccacagaagtattattaggtggtgaagaatcaggtggtattggttatggtagccatattcctgaaagagatgctttactatcagcattgtatgtattagaagcagtagtagaatcgggtttagatttaggtgattattatcaacaattgcagaaaagaactaatttttcctcagcttatgatcggatagatttacccttagcgagtatggaagtaagaggaaaattattacaacaattacaaacccaacctttaacagaaatagcaggtaaaaaagtcattgattgtaatacaatagatggttataaattccgtcttgctgatcaaagttggttaatgattaggtttagtggcactgaaccagtattacgcctttattgcgaagcaccaactttagaacaagtccatcaaaccctaaattgggctaaaacttgggctgaatcaaattaggggactggggactggggac

SEQ ID NO: 45 - DNA, 42196 bp, Sphaerospermopsis sp. LEGE 00249
  LEGE00249_60
ggggaagaaagggaggttaccccagtccccagtccccagtcaccaatcaccagtcaccaatcaccagtcaccagtcaccagtcaccagtcaccagtcaccagtcacttatcactacgagcgtagtcatcttggtagcgaataatatcatcttctcctaaatattcgccgttttgaacttctatcaaaaccaagggaataacacccggattttctaaacgatgaactgtacattgtggtacgtaggttgattgattgttactgagtaaaatttcactctcaccacacacgactttagcagtaccggaaacaactatccagtgttcactgcggtgatggtgcatttgcaaactgaggcgatgtcctggtttaacttcaatacgtttaattttataacctttaccttcttctaaaactgtaaacgaaccccaaggacgcatttcactggctgctattccttttgtgctaatgcttgcacttaaagatagtgtattatttgtgactttttcagtaagttgagccataatgacctcgttgtacaatgtacaaaattttaagattcttaatatttataggacttacgcaagattggaataaaaacctgattcttgcgtaggggtaattcatgaattacccctactttggttctgttttgcataagtcctgatttagtgaaaaaatttaatgaactttttaagaaataaaattaatccattaatttcactgttattaccatagcaaagataactccgatcaagtaccccttaattattcaaaatcagctttctacattaattcttcatgaatgaaatattaacttattctcaactttaaatagggtttgctgaaaaagtcttgtcgtgatgacaggtgacagtttcaagagttggatgggaacgatttttcctttgagtaagaattaaatgcaaggtttttaagtttctacctcgtaaaagctcgcacttttttaagttccagcaggctaagaccctttacctgtaatcttttcatctttattcagtaagccctaaatatgaacaagtttattatcctgcgacaatatgtaaatgcaaaacttaataatatctattcagaaatattattgaaaattttgcattttttacgtgggattgaccgtttatctatggttaataaagatacctataccgttatgaacacgggcggctgtatttggtgaacggtcgagtaattgccctcccaagtataaacttgtggaactaccaccgtcgaggttgagggcgttaacacatcccatgacctgcattaattgggcgtgttctgctaaggtgggtcctagtcctccggcgcggttgtggactgctgctatgattaaattacctgtactggtggtacaaatggcactgcgggcggctctttcgatgataaaggcattgctaaatttctcactttgagcatcgaggactatttggcggttttggattaaaagcggacctgcgccgataatatgggggtaacggttaaagttagcagagttagtggaactggtaatgttaacttttgtgccaatagataattttgcggcgttgctggtagcagtaccccgtaaagtgaggaggtagccgtctctggggatggtaacagatgtgacacctgctttacctcctggtgtttggttggtgatttggttattttgaactgtgaggataatttcgttatctagtaggggtgtgtaagtttgtccccaggtgggtgtataacgagcgatgccgttttgtacgtaggcactgttcaggaagagtatgggtagggtttggttattactggtgtttaaagtttcgtttaaagtgagacgaccaaaataaaattctccgttgttattccaggcgatcgcacccctattaagtatgggtcctgataaccattgattgtctcttttaactgcccctagtggtaatttattattgcggttaaaataaccaccattaattcctgctactgctaaatcccgttgtgctgtttggattaagggtgctatacctgtttgactgtccagactagaagatattggttttaaagttaacccagcttgacgggggttaatttctagccaaacgacgggaaacctatcctgacctacatttataaatctttgttgccagcgtaatccctgattccaggttatatctcttgctactaaagcatctgggataatgtcaacgactaaacgattagggttaggcagtgtagtaatttggggagatgacccaaagggaacactgagagtaatcctagtttgattatttaccatttccactttttgaatcagtgcgtctgggtctggtgtggttggtagttgttttgtttggtctggtggtgtagttggggcttggggtggataacgttgaattaagccattatcagccgtactatctagggtgatgatccattctcggttgggtggtgctggaggtgtagaactgagatttttgggatctgctgattttctaataatttgacctggtgcagctttccaaggtgtgggacgatctaaatcaaagactaggcgatcgcctgtaggtcttttcccctgacgaatattattgattttcgcaggaggggtagaaattactaactgatttccgttaacttggatttgccagccgttggtttgggcaaaattagaaatatctaaataacgatatccaggagaaaatttagctttgagggtggaagatgatgcagaaaaccagtctattggttgcagttcaggattagtggtatttaataaatctatgcctattaattgcctgagtgcagcatcactaacataagtgcttacagttcccgacgttcctggttgttgtatccaagcacctggtaaagttttaccattgagaaaaatttgattacctgataatagtgttggtagttgagaaatcatcagggggagagattgagaacggatgggagatagttgagcgttagtagtatcagcaataagtaaactaagtgctgttactagcattgaagacacagagtagaggaaaaatcgcagtttgttcatttcgatcatgagcatttttactattcgtcagttttggggaatggggaatagggaacagggaacgatccaaatatcagcaaaagttttgctattttccttgatatatttatacaaaccagtttaaattagtccattgtcccaaataagcacttttacgagtattacagattaatctacctttaattttatatttattcactcatggctaaagtaaaaaccactaaaaccgataacgaaaccttagaacaaaagctgtggaagtcggcggacaagctacgcaaaaacatggacgcagccgaatataagcacgttgttttagggttaatcttcttaaaatatatttccgattcctttgaggaattacaccaaaaattaatagagggtgaaggaatttatgcaggtgcagacccagaagataaagatgaatatatagccgaaaatgtgttttttgtcccagaaaatgctagatggtcttatttacaagccaaagctaaacagccagaaattggtaagtttgtagatgaggcaatgattattattgagacagaaaacacccaattaaaaggaattttaccgaaagtttacgctcaacagaaattagataaagcctcattaggaagtttaatagatttaattggtagttgtaaattagttaaagatgaaaaaagcaatgttgaacaactagatttagacttagaacagaatgcagtaaaactaaaaggtgatgttttaggacaagtttatgaatatttcttaggagaatttgccttattagaaggacgcaaaggaggacaattttacaccccagaaagtattgttaaattattagtaataatgatagaaccctattctgggagagtatttgacccttgctgtggttcggggggaatgtttgtttggagtgagaagtttatcgaagcacaccagggaaaggttgacaacatttctatttatggacaagaaagcaacgaaaccacctggcgtttatgtaagatgaatttggcaattcgggggatagatacttctcaaattagatggaataatgaggggtcatttttaaataatggacacccagatttaaaagccgattttatcttagctaaccctccctttaatgatagtgactggggaggggaattattacaaaatgatggacgctgggtatatggtaaaccccccgtaggtaatgctaactttgcttgggtacagcattttatttatcatttagcacctacaggaagtgctggttttgtcttgtctaacggttcgttatcttccaatactggaggagagggagatattagacagaaattagtagaagctgacttagtagattgtattgtcatgttaccaactcagttattttataatactgggattccggcttgtttgtggtttattagtcgttataaaaatgttaaacagaatgggaataaaaaccgcagtcgtaagggtgaggtgttatttattgatgcttccgaaatgggagaaatgataaatcgccggaatcggattttaactgataatgatattaataaaattgctgatacttaccatcaatggaaactagagaaggggaattatcaagatatcaaaggtttttgtaagtcagcaactattgaggatattaaaaaacataattttgtcttaacaccggggcggtatgtgggtatacctgatgtggaagatgatggagaatcatttcaggaattgatggagaagttaaccctggagttgggggaacaaatgcgagagggggaagatttagataaggagattaaggaacagttagccaaggtggggtttagaattgattaaaaaatataagatagacctaaccccccttttacccctttcctacaagggaatgggggtttcaaagcctctctcctcgtaggatagaggtttggagagaggtatttcagtaaattttgaaacttctgaaacaacctctaattcaattaattaataaaataatcagggatgttatgaatgcgtagagactctattttttataaactttttcaacaatatccatctgtattatttcaactattagacaaaccaccaaaaaatgcagatgcttatagatttgattccgtcgcagttaaagaacctaaatttgaaattgacggggtgtttttacctccagaaaatcaaagtcctggtactgtttatttctgtgaggtgcagtttcaaagagatgaacaactttatgagagagtatttgcagaatctcatttatatttctaccgtaaccgttctagatttagtgactggcaagcagttatcatatatccatctcgcaatatagaacaaagtgatatttacccccatcgtggattgctaaatagcgaacaaattcatagaatatatttagatgaattgggagatattcaacaattacctgtatgggtagggttaatggtactgacgactttaaaagaaagtcaagcaccagcagcagctaggtatttattaacaagaagtaatcaagaaaattcatcaaatgagatgattttagaaatgattactacaacaatgatgtataggtttgaaaatctgactttacgggaggttcaagtcatgttgggaatatcattagaaagaagtcgcgcttaccaagaaattaagcaagaaggacgagaagaaggaagacaagaaggaagacaggaaactgctttaaatttagtcattcgactgttaactaaacggtttggagaattaccggaggaagtaataaataatattgctaagttatctttgactaatttagaaaatctgggtgaagcgttgttagattttaccagtttacaagatgtacagatttggttaagtcaattgcaagattaattgatttattgtaggggtttagcagtgctaaacccttaatttaattattcatatcagaggttcaagttatgcaaagtagtagaggtaaaattatgactctggaacaagcagttttagaaaactttcgagaattacccacagataaacaacaggaggttttagattttattcaatttctcaagtataaattatcagctaaaataccagttgctatatctgggaatcaagaagttttcacagagactcaagaggttaatgatttttggtcagctttacaagactttagacaaagggtggatttagaaagtattgatgatgatacttttggaagtttgaacgctgatggacgcagataaacgcagataattttttattttattagactataaataatataaaattggttttgttgatttagttaaggtagggtgatttatgagtgagtggcaaaaaatagaattagaaaagtttataacatttcagcgtggttttgatattgtaaaacgagatatggaagaagatggattatatgatgttatcttttcatcaggttttggaggaaagcatgaccagtttaaagttaaagcaccaggtgtaataatagtccgaaaaggaacattaggttctgttttttattgtgatactgatttttgtccaacagatacaactttatgggtgaaagattttcataaaaaccatccaaagtttgcgtattattttctaaagacccttaaatttgaacaatatgattgtggttcagcaaatccaactcttaacagaaatcatattcatacacttgaagtaagtattcctaaatctcccgaagaacaaaaaagaatagcggctgttttatcttgtttagatgccaaaatagacaacctcagacgacaaaacgaaaccatagaaaagatagcacaaaccctatttaagcattggtttattgattttgaatttcccaatgaagagggtaaaccttacaagtcctctgggggtgcaatgtctccttctgaattaggcgatattcccgcaggttggaaggttttaatttttcaagaatgtttaaaacatttaatagacaataggggtaaaactccccaattttttgaaagtggaattccggcattaagcgcaaagtttgtgaaaggaggttttttaattaatcaagatagttttaattatgttgccttggaattatttgattcctcagaaaaattagaagttggcgatattattatgacatctgaagcccctttaggagaattattttatattgctaaaaatactaattattatccagcccaaagagtatttgctttaagagcaaatccagaaattatttcaccttcttattttaactattggttagccagtcctttaggtcaatcattaataaaacgtaggggtactggttcaactgttcaaggaattaaacaatcagaattatataaatgtgaagtattaattcctaaacaagagataatggaaagagcatcaggagtttttagccaagttttattaaaaaaagaagtaaatggagaacaaatccaaattttagcaaaaacccgtgatacacttctaccaaaattaatgagtggacaaatcaggattaaagaataatggaaaaattaaaagagttaatacagcaataccacaggtggcaaggtttaaaagattatgtcgaaaaaatcgagtattttaaaacctttgattttccctcagctataggaaatgcaaaagcactgatagaaagtatatgtaaaacgattcttgatgaacagaaaacttatgaatataaaacaaatgatagtgtaaataagttagtaacagaaactattaaaacattaaatattaatctcactaatggagtggcaacatttggcagtggactgataacagcgtcacaaaatcttggggaattaagaaatagaatagatacatcatctcatgggcaaagccttttaacgagtaaggataatcaaattgaagaattaactgcttattttttaattagttctgtagaattaattgcttgttttttaatcaaatattatgagattgaacacccacggaaacaacaagaaaaagaaatattgtttacagattttgaagactttaatctttatcttgatacagaatacggaaatgccaatattgcaggacttttttacgcaaccagtgaaactctatttttaatagataaaatagcttatcaaactaaatatcaagaatatctaggtagtcaaaatgaaactaactgaagaaaaaatcgaaaactttgttattagcttcctaactaacttaggatatgaacatataaacgctgctactattgcccctgacagcgacaaaccagaacgccagttagaacgccaaaaatatgatgatgttatcctcaaaaaccgcctcacccatgccattaacaccattaacccccacatccccctagaagccagagaacaagcacaacgcatcattaccaccattagcagtcccgacttaattaataataacgaaaccttccataaatacctgacagaaggaatagatatagaatatcaattagacggaattaccagaggtgataaagtctggttaattgattttcaaaacccagaaaataacgaatttttagcagttaatcaatttaccatcattgaaaataaccataaccgccgtccagatatcatcttatttattaacggcttacccttagtagtcatagaactaaaaaaccccacagacgaaaaagccaccatagaaaaagcatttaatcaactaggaacatataaagccgaaatccccagcttatttacctataacgccttcttaataattgccgacggtttagaagcccgtgtaggttcattatctgctgacttctcccggttcttgaaatggaaactttctgaaaaaaacgaacccccagccggaaaagaaattgaaatagaaaccgtaattaaaggactatgtaataaaaccacattattagattttattcgtcactttaccgtatttgaaaaaaccaaacaagaacacccccaaaccaaaattaccaccatcaaaaccattaaaaaaatagcagcatatcatcaatattacgccgtaaacaaagccgttgatagagtcattcaagctgtaaaccaacccgtagaaataactcaggaattacccacacaaaaaaaagatattcaagctgtaaaccaacccgtagaaataaatcaggaattaaccccagaaaataattatcatcaaactagaaaaggtggcgtactgtggcatacccaaggcagtggtaaatccttatcaatggtattcttaaccggaaaactggtattaaccctagataaccctaccatcgtcgtattaaccgaccgtaacgacctagacgaccaattatttgatacctttgcagcatcccgtcaactcctgagacaagaaccccaacaagcagaaaaccgcccacaggtacaagaacttttaaacgtcgcctccggtggtatcgtctttaccacagtccagaaattctcaccccaagagggagaaactatttatcccctcatttccccccgtgctaacatcgttgttttagcagatgaggcacaccgtagccagtacggtttcaaagccagagaaattgatatcaaagatgaaaacggcgtaattattggtaaacaaacccgctatggtttcgctaaatatattcgtgatgccttacctaatgctacctttgtcggttttacgggaacaccagtagaaaaaacagatcaaaatacccccgccgtctttggagactacatagacatttatgatattgcccaagccgtcacagacggggcaacagttcctatttactacgaaagccgactggtaaaaatagacctagacgaaaccggaaaacaattattagcagaactagatgaagacttagaaggactaggagaaggtgaaaacgtccaacaagccaaagcccaacgcaccaaattagaagccgtcatcggtgcaacccaaagactagaaaccattgcccaagatatcatccaacactttgaaaccaggcaacaggtattttttggtaaaggtatgatagttacctttagccgtgctattgctgtgcaactttaccaagaaataattaacctacgtcctgagtggcacagtaaccaactggaccagggaacaataaaagtagtcatgactgctagtgctagtgatggtgcagaaatggctaaacaccacaccagcaaacgagaacggagtattttagctggcagactcaaagacccccaggactcactacagctagtaatagtttgtgatatgtggttaaccgggtttgatgccccctgtttgcatactctgtacattgacaaacccatgaaaggccataacctcatgcaagccatagccagggtaaaccgtgtttatttagataaaccaggggggttaatagttgactatttaggaataggaaatgacttgagagaagccctagctttttatgcagaaagcggtggcaagggagaacctacattagaccaagaagcggctattaatttaatgttgactaaattagaaatagtagaacaattaatggctggttgtgcttatagtgaatattttagtagtgacactggacggaaactgcaaattattttagaagctgaggaacatatattaagtttagaaaatggtaaggacagatttaatcaagaagttactgcactgtctcaagcctttgctttagctgttccctcagcagcagcgatgaatgtagctgcacaggtatcattttttcaagctgtaaaagccagattacaaaaatttgatagtaacagtaatggactttcttatcatgatatttccacagctattaaacaagtagtagaccaggcattagtatcagcaggagtaatagatatttttgatgcggcgggaattaaaaaaccagatatttctattctttctgatagcttcatggcagaaattagaggtttagaacataaaaacctggctgtggaactcttgaaaaaactcctcaatgatgaaattagcacccgtcaaaaaactaatttagtgcaaagtcggagtttaaaagaattattagaaaataccctgagaaaatatcaaaaccgggttatcagtgcagcagaagtaattgaagaactgattaatatagctaaggaagttaccaaagccgaccaacggggggaagaattaggtttatctaattatgaactggctttttatgatgctttagctgaaaatgacagtgctagggatgtcatgggagtagataaactgcgagaattagctattgttttagtgcaaagaatccaaaaaaacgccagcattgactggaatattaaagaaaatgtcagagcgagaatgaaagtcattgtaaaaaggttattaagggagtatggttatcctcctgatatgcaagctttggctacagaattggtgttagaacaagctaaattatttaaggtttgctgaaaaagttatctgtattctaccactccaggcgatcgctaatcttggttaagtcgctttatttgtctactggacaacctgacaaaatttttgtccaccgagtgactggacaaactaaaattgtccactaggagagttgacaaacccagatggacagtcaagacacagaactgattaaaattcaccagtcaccagtcaccagtcaccagtcaccagtccccagtcaccagtcaccagtccccaattatcagggaatcttaaaaaattgtaatttttttagtcaataaaggtgataatatgtatgttccctatttatctattgaaaaaccattcaccaatcatcccgctaaaactaccaacactcacagttctcaataacacatctcaatcacacttttagagaaacggtttataataggggttctaactgatttagaccttacgcaagtgtcacaccaaaaatatgtcttatggtgctttaaactgcataaatccagtaaatcaataaattgttgatatctgatgcaccctaccaatgtgacattgattattgatagatagggtttgctgaataaacctaaaaccttgatatatcaaaggttagaggctgataaacacagaaattagtgcaagggttttgaagggtataccggaaaaagtgtgcattttttgggatttcaagagatggcaaagaaattttcaaatctcctcctgactcctgactcctgactcctgactcctatgccctcacggaaagactttctcagcaacccctagatagtttcctagttctcaaacagagaaatagtgttgtaaaaaaagaaactctctctttaagtgaaagggtgtttaagtgtgataactgtggatttgaatttgacaggaatttaaacgcagttattattctcttaaaaactatcagttaggcagtgtttgcctgtgaatggggtagtgccgacattaccaagatgaagcaagaagtaaactaacctcaaagtatatttgagtaggttttatatagcggtttacataacggcatatagtgttatattttgtaatacgctgtgcttgttgctgcaataggaaaattgctggacaaaagatagcggtatgttcttttgcaattaaatctcaggtaaatcccaaatggtgatcctgaacaaatggcctatatctggctaaaaggggattaaaaaacaccaagcttcactatctaaataaacgtaataaacgtaatgtcagggaaagcaaattatctagatcaaggtacttcttctaaaagtgcggtgcataaacacttaaaaaaataacgcggctattttaacaggggtgagcagaaatgtaaacctcaagttaaaattttttttccctaattttcccttaatttttagtgattatgtatttcccgaccgctaaatcttagatttttttctttgcggtagcaacatttgtcacattcataactcaacaatttcacgattctttcaggaataaaatatgaatcatcaatcattgaatcagggtcaaaacatcacaatgacaaatatggaaaataggtcaacttatcaaggtcaaagatggttagttgaagaacgggatgcttgtggtgtgggctttattgcccatcgctgcaatattgccaaccatgaaattttggctaaagctttagatgcgctgacttgtttagaacatcggggtggatgtagtgcggatcaagactctggagatggggcgggtattttgacggcgattccttgggaattgttgcaacaagaaggatttaaagttgctaatactggtaacatggctgtaggaatgatcttcttaccccaagatggggaatcagccaaaaaagctaaagaaatctttgagcaagtagcaaaagaagaaaatttaactgtactgggttggcgtaaagttcctgtacgtccagaagttttggggatacaagcaagagaaaaccaaccccacatagaacaagtttttctttcttcggctgataaaagcggtgatgaactagaacgggaaatgtatcttacccgtcgtcgtgtggtgaaagcagcgaaaaatatttctgaagaattttatgtctgctccctttccagccgtaccattgtttataaaggtatggtgcgatcggcagtattgggagatttttaccaagatttaaaaaatccagcttttaaatgtgcctttgctgtttatcatcgtcgttttagtaccaacaccatgcccaagtggcctctagctcaacccatgcggttactaggtcacaatggggaaattaacactctgttgggtaacattaactggatgatggcgcgggaagctactttagatcatcggatttggaaaggacgcgctgaagaatttaaacctttggtaaatactgaaagtagtgattctgcgactcttgataacgtgctagagttattggtacgttcaggacgtagccctttggaagctttaatgatgatggttccagaggcttacaaaaatcaaccttctttaaaagatcatcctgaaattgttgatttctatgaatattacagtggtttacaggaagcttgggatggtccggcgctgttggtatttagtgatggtaaaagagttggtgcgactttagatagaaatggtttaagacctgctcgttacgtgattactaatgatgactatatcgtagttgcttcggaagcgggtgtagttgatttcccagaaaccagtattatcgaaaaaggtagattaggacctggacaaatgattgctgtagatttaaacagcaatgaaattttgaagaactgggaaattaaacaacgtattgctaagttacatccttacggcgattggttgcaaaaataccgtcaagagttgtcagatttggtaaaaccatcagctaatggcaatggtaacggtaatggtcattatgtaactgaaagttctgaaatacccgataaacaaactttactgcaacaacagatcgcttttggttacactagcgaagatgcagaaatgattattcagccgatggcgaatactggtgctgaaccgactttctctatgggtgatgatattcctttggcggttttatcagaaaaaccccatctgctgtacaactactttaaacagcgttttgcccaagtaacaaacccacctattgatccgttaagagaaaaattggtaatgtccttgacggtggaactgggagaaagaggtaatttattagatccgcaaccagaacacgcgagaagattaaagttagattcgcctgttttgactgatgctgagttagaagcgattaaattatctggttttggcactgctgatttatcaactctgttttctattgatgcaggtcctgatggtttgaaggcggcggtagaatctttgcaaaaacaagctgcggagtcggtgcgagctggtgcgaagattttgatcttgagtgataagattgccccaagtggtgaaaagggtatcagtgctgatttgacttatattccgcctttgttggctgtaggtgcagttcaccattatttgatccgcgaaggtgtgcggatgaagacttctttggtggtgcataccgcccaatgttggagtacacaccattttgcttgtttgttgggctatggtgcgggtgcggtttgtccttatatggctttggatacggtgcgtgactggtgggctgatcctaagactcaacagtttagggaacggggtaagctgaataatattactctggatcaggcgatcgctaattatcgtcaagctgtagaatcaggtttgttgaaaattctctcaaaaatgggaatttccctgctttctagctatcaagcggcgcaaatctttgaggcgatcggtattggtggcgatttgttaaatttagctttccggggtactacttcccgtatcggtggtttaagttgtgctgaactggctcaagaagtgctttctttccatagtaaggctttccctgagttgtccgctaagaagttggaaaatttgggatttgttcagtatcgtcccggtggtgaatatcacagtaatagcccggaactggtgaaggcgctgcataaggctgtagatggtaagcagtataaccattatgaagtttataaacagcatctcaaaagcagacctgcaaccgctttaagagatttattggattttgcgagcgatcgcccatctattcctttagaagaagtagagtctgtcagcgaaatcgctcaacgcttctgtactggtgggatgtctttgggtgctttatcacgggaagcacacgaaactttagcgatcgccatgaaccgcatcggtgggaaatctaactctggtgaaggtggggaagatccagttcgttacaatgtgttaaatgatgttgacgaaaacggacattcacccactctcccccatctcaacggtttgagaaatggtgatactgcttccagtgccatcaaacaagtcgcttctggtcgttttggtgtgacaccgggatatttagccagtgctaaacaaatcgaaatcaaaattgcccaaggtgcaaaacccggtgaaggtggacagttacctggtcccaaggttagcccttatattgccatgttgcgccgttctaaacctggtgtaactttgatttcaccccctccccatcatgatatttactcaattgaagatttagcgcagttaatttttgacctgcatcaaattaaccccaaagcccaagtttctgtgaagttagtggcggaaatcggtattggtacgattgctgctggtgtagcaaaagctaacgctgatattatccagatttctggccatgatggcggtactggtgcatctcctttgagttccattaaacacgctggtagtccgtgggaatttggattatcagaagtgcatcgggtgttgatggataatgggttacgcgatcgcgtaattttaagagttgatggtggtttaaagagtggctgggatgtcctgatcgctgctttaatgggcgctgaggagttcggtttcggttctatcgccatgatcgctgaaggttgtattatggcgcgggtgtgtcatttaaacacctgtcccaagggtgtagcgactcagaaagaagaactgcgtctgcgctttacaggtattcctgatcacgttgtgaacttcttctacttcatcgcggaagaagtgcggagtctgttagcaaaactgggatatcgttctttaagcgaattgactggtagggcggatctgttcactgtgcgttctgatgtcaagctaacaaaaacccaatctgtgaatttagattgtttaactaagttaccagatgctaaatctaaccgtagctggttagaacatgaagaagttcacagtaatgggccagttttagatgatcagattttagcggatgcagaaattcaagcaaccatcaaaaatcaatctactatcaccaagacttacaaagttgtgaatactgatagaaccgtaggatcaaggttagcgggtgctattgcttctcaatacggtgatagtggttttgaaggtcaaattaacttgaacttccaaggtagtgtaggtcaaagctttggggcgtttgtcttacctggtttaaccttaactttacatggggaagctaacgactatgtaggtaaggggatgcacggtggggagattattattaaacccccagcagatgcgacttacaactcagccgaaaatgtgattgtgggtaatacctgtctgtatggtgcgactggtggggtgttgttcgctagaggtttagcgggtgaacgctttgcagtgcgtaattctaaaggtacggcggttattgaaggggctggggatcactgctgcgagtatatgacaggtggtgtagttgttgttctgggtaaagtcggccgcaacgtcggcgctgggatgactggggggttaggttacttcttggatgaagatggttctttccctgagttggtgaataaaaccattgtgaaaatccagcgtgtagcaacggaagctggtgcaaaacaactctatgatttgattaaagctcatagcgatcgcactagttcaccaaaagcgcagttaattttacaaaactggtcagagtatttacttaagttctggcaagttgtaccaccttcagaagctgatagtccagaagctaatgtggaagctgaaaaggctggtaaacagttgagttctgtttagttaggtgactgggcattgggcatttatctcgtttatctcgttcccagtttccaactgggaatgtgatcaaagaggctctgcctcttttatgactcagtggggctgaaggcagagccttctaaaattcattcccatacagagtatgggaacgagaaaacgagaaatatttacctcctgcctcctttctcctgcctcaaggggcaacttcttatcaattgataattgacaattgataattgacaattgtttcattcaaggtttaaaacctcctctttcaaggggaaaaaatcaaaaaattccgttttttcaatcctctcccttctagggagaggtaattgtcaattgttcattgtcaattgtccattatttaatagcagctaactgttgctgttgatcttgcatttccaagagttcgggaacagtaacaaatttatagccttgcttacggaatctactgataatttctggtaaggcttggactgtgtgagtgcgatcgcctccaccgtcgtgcattaaaacaataccccctggttttgccgatttgaatatattgttaataagtctaggtacagcaggacgggaatagtctatagagtcagatgaccacataataattgcatacttattatttctggcgtaggatacgacaccattagtcataattccaccaggtggacgaaataaaccggatttcacccctgtagttttaaaaataatatctgtggtattggcaacttcataagctgcggcttgggcgttcatgtgatgataccaatgatgccaggtatgattagcaatagaatggccttcagcaactatacgtctagttaaatcaggataattttttacattttgcccaacaacaaaaaatgtacctggaatattattttttttgagaatatctagaacctgggcagtgctttttggccatggaccatcatcaaaggtgagggcaataactttctggtttggaggtagggttgcaaatttaattgttgctccttgaaagcgtgatggtacatcagtgataataccttttgcttgtgcttccttttgccaagtagtaagcatagcagctttgaatttctcaattcgctgctgagtgcctgtattagccgcaatctcattgatgttgatacgctggttattttgagattcagaggtatttgccgttaccagcatcattaacccaatacccaaagtaccagttaaacatagcaatacaatcaaaattccctgcggccaaaaaaatgacttattattttccactgcatagctccttcaagggttgaaccgtcaattaggtttctgacggtaggtcataacacattttttctagatgtttagatactcagttaggtgctggtaatcatcaaaactgcaatggtaaattacagaaattctgaaatttaagtagacaatttatacttactggaatttggttgcctcaaacggtgaaatttaccattcagttacttccttaagtatggaatctatgacttgtttacttttatccataactacgggtaataaattaataattattccacataaccagctttgaggaatagagtatctaacccaaaataaggacacatactatcattaacattactagagatgtatattttaaccttgaagttccttcctgcctgtaacagaaaaaataaaatttttcacttgattttgttgtttttagaaatctatcgaatagatagacaaaaaaacaactaatcatagtttcccatgattgagtctgaattatttgttaatatagatactgctgtataaataattctgaattggattttatttgcgccaaattactaagattactcctgtaacaataaaacctaatcctacaagacgcatcacagaaataggttctcttaaaataaagaaacccaataagacggaaaatatataaccaacggatactgcaggagcagcaacgctaaggttaactcttgttagtagtaatatgtatgcgatcgcaccaataccataacaggttagtcctaataatagttctggtatggtgatcatgttgaggatgagattaataatgttacctgcatgaacttttcctagtttcatggctcctgttttgaggaaaaattgtccagcaacgctgatgaggactgagaagaggagtaaagtaaattcttggggtgacactggtatttcctgagtattttaatggtgattttttattaaacaaaaagatagacaaattagggaattaaataattagattatttgagctaattaagtttttgtcaaacctcccatttcctttactgtataaagaggacgacctttgacttcttcataaattcgaccaatatattcacctaaaataccaatacaaattaactgcactgaacctaggaaaaacatggcaatagtaattaatgtgtagcctattaggggagatactggtgcaaatattcgccaataaagaactaacaagatcataattaaggcaatagtagctgatatgatacctaaataggttgccagtcttaaaggaactgtggaaaatgagataataccatcaattgctaaggataaagatttaccgaaagtatattttacatctccagcataacgagggcttctttcaaaaagtacggatgtttgacgaaaacctacccaagcacgtaaaccacgaatgtatcggttacgttctggcatagcattgagaatatctactacttgtctatccattaaacaaaagtcgcctgtatctacagggatgtcaactttcgccaaacgtttgagaatgcgataaaaaagatatgctgttaagcgtttgaaccaattttctttttgacgggacttgcgctgggcataaactacttgatatccttcatgccatttgtcaatcatggttaaaattaattctggtgggtcttgtaagtcagcatccatgacgataatgcttttaccttggacaaaatttagacctgctgtgactgcgacttgatgaccaaaatttctggctagacttaggtaacggattcgactatcatgatggtgtaattcgcggatcatactcaacgagcgatcgcggctaccgtcatcaattaaaatcagttcaacttcaccgtttaattgttccatgacatgagtgagacggcgatacatttctgtgatgttttcttcttcgttgtagatggggatgactagggagtagatgggctgattcacggtgataattgatttgatggataatttataattacggttggttaagttgagaagttaagagtacaaagatagtttgcagaaaatcaagaaaataagtttaaagtatagtaaaattggagtatgagctaaagaattaacatgaattttaccactaattaacttaacaatgtataacgcagaactcccagataacttaggtgattttggagaattactccgtagagttttttcaggagaagaagttattctttctcaaggtggtactcctgtggcttgtattttacctttttcccagcagccattaccgcgaataccgggtttagatcgtggtaaggtggtgattgcttctgactttaattcacctttaccagaagatattttaaaagattttcttaatcccctagacattgagaatgaaagtattacttgatacccatgcttaatgtttgcttcttcgttgtatatggggataactagggagtagatgggctgatttattatattacttattaagtttatttattaacctaaccatttatcttgaccatatttaatccattgttctactaacatcaccgcagaaattaaactcataaatagcaaagtttgatattttattttaccaggaatacaacgatacaaatatcctaaaggaaggaaaaagaaaggggtcgcaaatatatatctggctaaactcattaaccgatcaaatgtaaaaaattgaattaatgaatgagcagttgtaaaatacacacaaaaccaaaatatatagttaactgctaaattattagtataatcatgaatttttacttgagtgaaagtgattttattcttcattgctttgaaaaaattaaacccatatattaaaattaaaagaggtggatataaataaagaatactccaccaaattctatatcttggtactaatataatattctgtttttgtgtatatttataatatgtcaaaattagagacaataacaaaattatcaaaggcaggtaaaaacctataatatcaactaaaggtgattttggaaatagtagaagttctaaatgaatacctaatttcttgccccaaagacgttgatcttcaaaaggtgcaaaaaaattacctctagtttggagacaatagttaccataaacagcataacctgataaagaggcaacccaaatagtgacagttgttttaatttctcgatgatatttttgcagatgaattaataaatttttccaagaatatatcttggttttcaacatttccaaaccaataatagttattaaagttaatatggttgcaaaaaatacttgaattaatataggtctggttaaactcatcaagaatgtaatgatgaataaaaaaccaagtttgaggttttgattaattttattattgggtaaacacagccagataaataacgtactaaacaaggaaaacatactttctgtgtaaccaataactctaaatattgccattgggttaacagtataggctaacattattgagaaagctaaagttgtgcgatttaacgcagtttttatcacccaaaatagtaaaaaattagtaattaaaaatataccactaccaacaattaaaaaataatgtgctgcttgttctatagtttgaggatgaaagaggttacgaataataaaagtccacaggggataaaatgctttacaactgggattaacagccatttctgcataatgtaaaacatcccaatagtagcttttatgaggtaattgaggaggaatttctcgatttatttgcgttgctgagaagaatttatgaaaagcatctggatctatcaacattcccacagcagcacaaaaaataaatgcaccacaaataatcaagggtaatatccagttaatgtttttttgttttgggatcattttatttaggtgaaaacatttgattaatttttaacaaataataaaatatcatcttactgctacggactaggtttaatgaatctgttttccatatcacatcacattgaactttaaatacttatatttgacaattggatagcaacagcagcgaaccgtggtataatttgccttgtttcttaactaacgtattaaaatttactatattaccagttacaggggtatgcggcaatggtgcaactaaggttatccagtgttatccataaacatccacagtttatcttactactattaagtgcattattgttatttgcgaacaatggcaataatagtttattggcctatgatgaagcatattatgctatacaagcccgttggatgttagaaacacaagactggttaacaccccaatggtggggtacacctatatatgatcgcacggttggtatccaatggttaatagctttaacttatcaaatatttggcatcaacgaatttagcgcccgtttacctagcattattagctgtattattagcgttatcctgacatatcaaattggtacaattatactaaatcgccaagttgcttttttagcagcaataattctatgtttaatgccaatatggatatttgaaggacgttctgcaactcaaaatactccactagtttgtgttgaactactgggaatttgggctttattacgtggtgaagaattaggcaataaacagcaaaagcaaaaaatcctctggggaattttagcaggtgctacttttggtttaggattcctgattaaaggttttatgattattttaccaggagtagcaattattccttatttaatattcaggaataaacaacatcggtatttagaaaatattggcatttatttaggtttaatcattggttttattcctgtaatcatttggttaactttgagttgcctgaaatataatagtttctttcctgtaacagatttatttggaaaattgctttatttatctgctgatgacacatacaacccaggcacattttattatttttggaatatacctttaaatacgtttccttgggcattatttagcgttatagggattgtgtgtattttgttttaccgaaataatcatatatctctgttgctaggttatccaattatcttgtttattctcctctgtagttttagaactcgtacaccttattatcctttgcaaatattaccatttatggctttgtttgcatctgtagcactaataagaattgaagatatttaccaacttcgtaaaaaacgagtaaatcaaatcatatcttatttattgtctgcctttacaaccttgggcatcttattattagtcttaggttcattaataactttaaatattcacttacctgtaatctctctcactccagaaatccagcaatatggtatattaggaattattttaggcgcaagctgggcaactattaatactacttggaaaaatcgtaaattcttgcctaataaatattggcttgctagttgggttatatctccttatttaacaataactaccctgggatttataagtgttttaggtgatagaaatccagttttcagaaccgaactccaacaaccgcaaattcatcaaattcttgctgttgaacccattaactttgttatagataacccagtcaataataaatcagatgctgaagttgttaattattcagaagtagaaatttcaaaaactttcatgttgctaagtttctatacaccacaattaggtaaaataacaaaaatacaagatttacaaactaatagctatgcctggataactcctaagatacccacaaatactttaaatcaatatgagattatgggtacagtcaaaggttggaaactcatttacaaaaattaaacaaacatcaatctttatcatcatggaaaataactcattcaaagcagaagtcaaacaatatttcgataaaatcgcctttgacttagattggtggaatcgtcgcaataaatattattatcaagatatccaaaaattacataattttattatcccatctggtagtaaggttttagaaataggatgcggtacgggagatttattagcagcaactaaccccaaattaggtgtaggtattgatttttcagaaacagtggtttctattgctaaggataaatatcctgatttagatttttattgtcttgatgctgagaatatgaatctagatgtttttagtaatactcctatttcatcttgtaaatttgactttattattttatctggtgtgcttggttatttgacagatattcaagtagtcatggaacggctaaaaatgttttgtcatcccagaacgagaattattttagtatttcataattttctttgggaaccgttgctgcggtttgcggaaaaaattaatcaacgtcgtccccaacctccacaaaactggttatcaatgaatgatatgatgaattttttagctattacaggttatcaaccagtaaaaattggcagaagatttttaatacctaaacaaataccaataattgctaatttgataaatcattatatcagtcaattaccaataattaatcatctgtgtttaactaattatgtagtagcacgtcccgcttggtatgaaaatattaatgatgtcaaaaaatataatgttagtgtaattattcctgcgagaaatgaagcgggaaatattgctgctgcggtagaacgtttaccagatttaggtaaaagtacagaggtaatatttattgaaggacattcccaggatgaaacttgggatacaattcaagaagtggttaataactatgaaggaaattttactcttcaagcatttcaacaaacaggtaaaggtaaagcagatgcggtaagattaggatttgcaaaagcaacaggagatattttaattattcttgatgctgatttaactgtacaacctgaagatttacaaaaatttgtagaagttatagctacaaatcacggtgaatttattaatggttcgcgtttagtgtatccttattctcatcaagcaatgccttggttaaattctgttgctaataaattttttgctttgttaatatcttttttgttggattgtaacattaaagatactctgtgtggaactaaggttttatggcgagaagattatgagaaaatagctaataatcgcagttattttggcgattttgatccctttggagattttgatttattatttggtgcagcaaagttaaatttacatattgtggaagtacctgttagatatcaggaaaggacttatggtaaatctaatatttctcattttcgtgaggggttgattttgttaggtatgtgtttatatgctgccaagaaaattaagtttattttgtagttttattatctgggtttatgtatcctttcttaaacagatatctaccaaatttttgatgatttaaacatacagaaaatcacaaagtaataacaaatgctaacatggcattaattaatattagtaaattgaataaattggtgcgtacttcattagactgagaaacgctatatatgttaaactgatatacatagctttctaatcaaactaatcaaaaatatgcaactcacccaaaagcaatattacaccccagaggaatatctaaaattagaagcaactgcggactacaaaagcgaatatattgaaggacaaatcattccgatggctggtgcatctataaatcataaccgcattacaggtaatttttacgccgagctaaattttgcctttagacaacaagacaaatatgaagtttttaacagtgatatgcgtctatggataccccaaaaattaatctacacctatccagatgtgatgattattgcagatgaaccagaatttttcaataatcgcaaagatacaattaccaacccccaggtaattattgaggttttatctaaatcaaccaaaggttacgatagagaagataaatttgcagcttatagaacaattcccagttttcaagaatatgtattaattgatcaaacccgcattcatgtagaacaattttctaaaactggcaagaaaagatggaatttatatgagtacgatgaagaagatgaaaacatatctcttgtaactgtaccttttaaaatttctttacagaatttatataataaagtaaagtttggagttgtggaatctgaatcagaaaataatagttaaatctcgtcaaatttagcagtatactatactttggttcggctatatatccaacgcaataacaatataataaattcaatcttgacataagtgcaaattagacggtggtgagtgttaaaagtgagtccttaacaatttatagttaagagtatccgtaaattgttaaatcattgtgaaagctattacccttcttggttctaccggttctattggtactcagacactagacatcgtttctgaacatccagacaagtttcgtatagttggtttagctgctgggcgcaatgtggagttattcgcagcgcaaattcgccagtttcgcccccaaatagccgccatttccgctgctgataagttaccagaacttcaggaagcaattaaggaccttgatccccaacctattttactcgctggggaagcgggagtgattgaagttgcccgttatggcgattcccaaagtgttgttactggtatcgttggttgcgcgggtttactccctactatcgcagcgattgaagcgggtaaggatattgctttagcaaacaaagaaactctcatcgctggtggtcctgtggttttacctttggtggaaaaacacggagtgaaactattacccgcagattcggaacattcggcaatttttcaatgtttgcaaggtgtacctaaagatgggttaaaaaagatattattgactgcttctggtggtgcttttcgagattggcctgtggaaaagttaccgacggttaaagttgcggatgctcttaaacatcctaactggtcaatgggtaaaaaaattactgttgactcagcaactttgatgaataaggggttagaagtaattgaagcccattatttgtttggaatggattatgatgatattgaaattgtcattcatccccaaagtattattcactctttaattgagttacaagatacttctgttttggctcaactgggttggccagatatgcgtttaccgttgctttatgcgatgtcttggccagaaagaatttacacaaattgggaaagattgaatttagtaaaatgcggtaatttaactttccgtgaaccggatcatcaaaaatatccttgcatgaatttagcttatgctgctggtagagccggcggttcgatgactgcggttttaaatgcggcaaatgaacaagctgtggcgctatttttagaagagaaaattggttatttggatattgcgcggtgtattgaatgggtgtgcgatcgccatcaaaatgataacaaacaaaatccttctttagatgacattttagcagcagatcaatgggctagacaggaagtttttactgctactgaaaagttagcaaataaacctcagatagtttctgtgggttaagttctagattcccgatttcttcaagaagtcggggatcttctgcgatcgctactctttcatgatataattagaactaataaaaataatattgctgcaattgaagccatggagataaatgccatgattaccctaaatatagatgagattcaaaacaatttatcagaatttatcaaattgattcaagaaggtaatagcttgatcattactcaagcagataaacctattgctgaaattaaacccataccaacaaaaccaactcaaaaagaacgccgtcctattggtttatgtgaaggtgaatttgttgtacctgataattttaatgatccccttcctgaagaaattattaacctatttacaaatccatgaaaattatcttagatactcatatctttttgtggtttattactaataataaacgactagcagaccaatattatgatgctattagtaatcaagataacgagatttatctcagtgtagtttcagtttgggaagcaacaattaaatatcaattaggaaaattaccattaccagcatctcctgaaatttaccttccccaacagcgtgaaaaacatttaatttccagtttatctattactgaaactacaattactcaattagctaaattaccaccgttacataatgatccctttgatcgtcttttactctgtcaatctttagagcatgatttcatcattatgacagaagataaagtaattctctcctatgcaatggtaaagtttttctaaaaatataaaaaagcgaattgagaagtttactaccattttaatggtaatatcttaaactaaagtgcgatcgctacaaccctaattctttttcaatcagttttattaattccagaatattacgagatttactaggttctacattagactcttcaattatatggacatgatggggaaaattagataaattgggaaaatgcggtacattatcccaacgttttcttaaaattttcttttgttcatccatccactgataacgataaccaagggttacaaaatgtccttcaatcatagtaaatgattctgctatttctaaaaaatcattatttactaaagttaatccgaaaatatcccctatcaaataaaattttttattcaacaatggagattttaataataatgtggctagttgctaacttaatttttactgtattaatataatcttgtagttctattatttagattgttattaatttagtttagttattaattagttattaattttaatatgttgttgagcattatttcacatttcataaaatacactccattcaaaaaactcggttcttcagtgcctagtatgccaaactattaattaaacatcaaaaatgtgtttaaaaataaaggcaaaaagccatatcccatgaaaaatatctaaaatgcgatgtactgagcttgtcgaagtgttaataaataatgcccgtatttatttatcataagggttttatggtttttgtgaacgcaatctagcatactatgtactgatgaacccttattgagaatacattttgatgacatttttggtgatttagtgtttctcaaatgccttttttcactttatgcgtcttatgcgtctgtttttatactgattttactttctctctacgtaatttacctctgtgacagtttggggtgcggaatgtgggtttaattacaaccagctacttataaactaggaatatttgacttttcaaacgtcattatatacactataataaaatcagcacttaaacaagactaaaaatattgccaccgcatttaaccaaataagctgttgtgcatttaatttgtataagtggaacagacaagaggcttgttccacaagagttcagaatattagtattatacaatttagctatgtaacagcttaccagtcttttatttgtgttttttttgtaagtgcaattgacttttattcagtaatacccctgaaaaattcatattattcaatacttgacagactatgactaaaatgcaactccactttaacggtactttccccctcaaaaaaaccgaaattaaaagcatactagaagcagcatcaacagagataggtttaaaagataccttagaaaacctgatggcgaaaacaggtttaggaaatgctaaagttggtaaaattaaaagttgggcaatgagatccggtttagttaaagataattatttaagtccagaaggaaaaatagtattaaaacatgacccttatttacaatctattgtaactgattggttcatgcacttttatttaagttttggcaattacggtttaaataaaactcctgaaaatcctgccgactggggaggatggacatattttatttatacatttttaccagaaaatcccacctttaccaaagataatttatttcaaaatagtattcctatatttgaagaacctgctaaagcagttcctgaaagattcaaatatattttaagaacttacaccgaacaacaagcattagctaattgtcattttctccaagaaactaaaaccgacacctatcaaacaggaaaagcgcaacttcctaacccttatttaatcgggtatttcctagctaaactgtgggaacgagattttagtaaagaaacttctgttttaacagatgatatcattaatcaaaaaatgggaattgtgccagtattaggtatagaaaaagaagcattgcaaccacatcttaataatttagaatctttaggaattatcgaacaaagacgcacggttgcgccctatcaaattattcgtcgttggaataaccccttaaacttattagaaaaatcctatggtaacaataagtaattcactatttaacttatcacttgcagatgcaaaacccacagattcccctcatttattattgtgggataatccccatgatgcctcgattcataagctgacatttaacaataatgctgaaatcataagttatcgtgatgacttattgaatcgtgtgaatttgcaacaaaaattcctgattcttcatcaaaatttagatcaagaaatagatgcaatacgacaaatttgtgctaatactaataatagtagtaaatataacaatcaaagagtcttactattaaaagacttagatattttaatcacctatctttatagcaaaccgtcatctcctatcagtctactttggcaaaaattgggagatatgagacatttagaaagcattttatggattttacttcctactcaaatacatcctattaactggaacaaaaaacgaattatcaccatagtctaaaactgataccagggagatttaccattatgcaactcaatcaaatagtacaaatcaatgaatcaggaatgatagctaatgccgttaactttggtatgatggctgatgctgataaaaacttactgttatgtcaaggatttgtatttaatcattctactttagatgtactaattgcaattcaaaaaagttatcatagtcttaaccaaccaaacattcatttatttgtacaagattacggtaaaggtaaatctcattttgccttagttgcagcaaactattttcaaaaaatattaaatagtcctgaaaatcaaggtattttaaaccaaattaaaattacagcaggaaataatcaaggaatattagaagaattaacagcttataaaaaacgtaatcccaaacatttagtaatctgtattagtggagatgaaggaatagatttaagacagatatttttaaaatccctgcgtcaaaccttagaaaatgaaggaatcacagatactctagcacagcaactttgtcaaaaacccctggaatatttaaacagcttaacggaagacgagattgaaacagctaatcaatatctagaaagtgtagaaaatcaatttggaaattttgacagtctaattgatttattaaaaaaagataattatcgggtaattactacagttaaagaaattagtagaaaactaaataaaggatttgctattgattttgaaacagacttaaaaatcgaagaaattttaccacaattaatcaatgaattatgcagtggacaaaatgccaaatatgcaggaattttgattttatttgatgaacttaattattatcttaaatcttggtcagcagattcagtcagtgctggtggtgcttttttacaaagtattactaaagcttgtgaaaatcatcaaagtaaaattgctttagtttgttttacccaaattagacctttaaaatcagttcccaatcaaattaccagtcaatcatcagaagattataaaaaacttgcttctcgtttagaaattgccgaaagcacctatgaaccagtttctagtttggaattagtgattcaaggtttattggaacaacaagttaatactgatttgtggaggcaattttttcaaaattggaatggtactctgttagctgatagtagaaaatctcatgaacaccgaattaacatttatagagaaagaaattggagtttagagcaatttaataacatcctaactattggttgttttcccctccactctttgaacagttatttgctttgtaacttagattttactcaaggtagaacagcaattcaatatatcaaagaagatgtgagaaaatttattaattctcaaccagtggagaaaaatggtaaattaaactatcttcctgcaatttctttagttgatgcttttgaaaataacttttcccaaccagaattttatcgttattattcagaatatgaaaaagctaagggtgatatagcttcctcagctacagaaaaagaaattgcagttttaaaggctatttttctattttatgttagtcaaaataaactacataaaccagaatcagaaaaacatgaattgatcctcagtgaattaacaggtttatcagtaacacaaaccaaagaaacattagataaactaactgatgatagaaaagttatttatttcaatactggagataatacctaccgattttattcgggtagcaatttactagaaattagccaagaaatagcagaagaagcaagtaaacaagctgacagaataacagttaagttagcggtagatcattgtacaaaaaaactgacaaattacctgaaatcttcccaaattccaggaacagattttattgaaaaaaatcaacttattcgggatgatgaatggttttttgaatacaaattttacagtatcaccgattttgaacaagctttatctggttataagaccatagaaaacatagcaggaaaaggaatttttgcttatgttttagcagaaactatggaagaaatacaatatattcgtaataaagtaaatcagctaatttctaaatctaaacatcaaaaaagtattgcagtagctattcctaataaaccagtaaaagagatttgtattgatttactaaaaatagcaattatcacaagaaaaaatactgctgaaaaacaagcatcaggtacagctttacaacaattaaataagcaattgcaagaaaaaataaatcgagaaataaaagaagtaattgtttcagcaacttattattgtctgaattttgagaaactaaataatactgaaaaacaagatcgagaaactatagttagtcatctgttacagcaactttatccatttgtaccatctgttgctaaaaatgataaaatagcgttaaaaagttctactggaggtactatcattagttatgcagttaaacggttattagaaaacgatctcaatcctactaaatttcctaaccaatcataccatacgttagtaactcaagtatttgttaatagttggggattatttaaaacaacttctcaaaaatattctgtacaaactcccaccaatcaaaatattatagctgcatggaataaaatagatgaactcacagctttaaacaataaacaaagaacatctatttatatagatagaatttggcaagaattatctcaacctccctttggttacaatgaatatacctttacaatgctatttacagcatggatatgtgatcatcgtagcgaaatcacattaaaaggtaattttggtattcccaaaactaagaaagaacaagtaacaaatgaagaaaaaccgatcaaagactgggtaacaactaacgtctttgataaacctaaagagtttgtcaatgaatggattttaacatcaggaaaaaaacctcagttaattcgtagtcaacctgtgatatgtcctgaaataccagaaagatgcgcttataaccaagcaaaacaattgatttcacaaattgatctatttattagttctgctgatcctgatcaaatacaattacaagaaatcaaacctaaaaaagaacaaattttagcaggaataagaaaaattgaccattggttaaaaccaatagaagaagcagaaaatttacccgatgatgtcaacctggaaacgttgataaatctttatcctttgttggaaataccactggaaaaacccaaaacttttaatttagctgctaataatttagtttctaatttagcaaatcactcaaaatcatcagtatcatccaattcatcagatactattgttgtttatcctactgcacaacaaaagcaaagtcacactgatgctttaaaaattgttcaagataaaattaacgaagtagttgtaaaattaggtgaaaaagctaaatttctgaaaacagaacaagaactgggtggttataaagttcaagttcaaacagcaatagagaaaattacacaaattgacttacctctacatttactggataccttaaattactctttgcaagttgctaatagaaaacttagtgaagttcaatatcagtcacaaattaaagactgtttagataaaatccaaattcgttataattctctcagtaataatgcaactcaacaggattatattgacgctattaatgatgttgagaaattaaccaatgaggttgtaaaaaaagaatcacggtatcaggaaataattaaagacattcaaaataaatctcaacatttatccgaaaaaattaacctttgggaagaaagaatgatagatattactaaagatcaagcatggaaattatctttagaagttagtcaacaacaaaaacgttttactcagccacaatgttcacaaaaagtcaaccagatattagaaaacttagaaaatattatcaaaaatactcagcaggaacaacctaccaccaaaaaacaggatgatactaatttaacattagaagacattaataataaattgcaggaaatccaaagtcaaactcaagactatacaaatcaagaaaaccaaatcattgctttatttaaacaacttcctgtttctataagacaagaagtatatcaaaaattagcagctttcttgaataaccaggaggaaaattaatgagtaaaatcattttagatcctactggttcatatccaagaaaaaatcactatactgtcatttctacagaagtagaatggttaaaacattttaccctgaaccatgaatattatttgattcaaggtaaagcactttgtaactggacaaaagaatggttaagagtatggaataaattagatttgattattgacactaacaaacaagattttagtgaaacagtaatagttaattgtgttgtaaaatgtgaaggtttaaaacctggagaattaacaatctcaattcataattatgatcaaataactttgagtaatctgtatttaactattaatgagttacccaattttcaaaatgtaaaactttcagagtttataattccaccccaggatcaaataattcatcaaataaccattagtgaatatcctcaattaccaccagataaaaatacaataactattccgttatctggtaaaatatcatttggttttaatgatgatcatttaggagaatcaaaactgggttatgattcatatttgactattaaacaaatctacaatagtggttttcaaggagatttagatgatttctaattatgataatgatttagttactagcgttttccaatcattaagtattgacaaaaaacgcttaccttctagtggactaactaattcaggtattcctagttttgttgctgaatggttactagataaacttgttccgggaatgggtaagttaaatgatttggaattaaaaaaagttaatgattttgtccaaaaagcatttcctagaaaagatgatccacaagttattaattataacattgctaaaggagaaattcataaaataatcgctttaatgcaggtgagagtaaaattagaagctaattctaaacaaatacctgaacctttagcaaatatccccatcttaaatttatcaaattgtgaaatttccacagatattgtagacaaatatcaaaggttacttagacaaggagtatgggggaaaattaccttacgcttaaacagcaatgtgaatggtaattttaacgtatcagttattgattttgatcctttccaatcatcggaagttgatctacaagaatatgctcaatgtcgttctcattttaccacagaacaatggcgagatttaatgttttgttctatgggttataatcccgaacatccaaattataatcatcttgcaaaaacacggatgttaacccggttaattcctttggttgaatctaattatcatctcatggaattagcacccaaaggaacaggaaaaagttttgtttatgaaaatattaataataaagtttctgtagtcagtggaggtaaaataacacctgcaaaattatttattgatggtcaaactaaattagtgggtttgttaggacgttatgatatagtagtgttagatgaaattcaaagtttaacttttgataaccctgatgaagttattggacccttgaaaacctatcttgcaaatggacgttataaccgttctggtttttctgaaaatcccatttctagtgattgttctttggttttattagggaatattgaattagatgaaaatcaacgtcctaaacatagatataatttgatgaaaaatttacctaaatttttctcagaaactgcttttttagatcgatttatgggtattttaccagggtgggaaattcctaagtttcaacgagatatgattgctgatcaagtaggtttaaaaatggacttttttggagaagcattattatctttaagaagggataatcgtttttatcaatatgcacaagaacatactgattttgatcatcaaactgttacaggtagagatgaaacagccattttgaaaactgcatctggtttattaaagattctttatccccatctgcaattaactttacaagattatcaacgagattgtttagaacctgctagagaaattcgtcagtacattcgtaatattcaataccatttagatgatgaatataaaaagtatggaaaggatatttatgttgatgttaaataattttaatgttctcattaaacatgatgaacacaatcaaggatcttgccattttgcaatatagtagatagcctatttaataaccctgatttttcagttttggatatcatgatcattaccttaatagtcgcttggataatatttgtcatcctgtggaaattagtcaaaaccaccatcaaaactgccgtaacttgtgcagcgatagtggttttattatacttcggttttgggatcacacctcaagatatttggcagaaaatctctgaaattactcaaaatatctcccaaatacttgtgcgtaattaaacttaactttgcgaaaaataaatttttaattgctgatactgttaagtaacatttcaaaagattcccaatcccaaatccaaaatcgtattacttgattgtattacttgtatgaagcagtaattttcgccagtgcatccttcattgctggaggtaactgacgcataattttacctctttctctgtctaatgctaccaatgtcacctgagcagaaacatataattcttgctcatcagcagaaacaattttataatcccagttaatgcggacacctgttacttccaacatccgggttttcacaaccgccatcattcctaattgcagtgcgcgatgatagcgtactgataattctaccactggtaaatcacaacctaaagctaccaaatcagcaaaatcaatacctatagagcgcaaacattctacccgcgctgcttccatccaagttaaatatgtaccatgccaagtaatgccagcataatctgtatgatgaggctgcactctgatcggatattcaaaccaagtatcaaattcagtttttgttaacttctcgatcgcactggtaggtggtaattttggttgacttggtgtttcttgagtcattttcaatcttctgaataattggttttcttacccatcagattttaacagaccctgcaaaatacttgacaaaaccgcaaaaacaaggttcattgtcggtaatggtgaaaaggtggtaggcgttgaaaaaacaaagccgctatcaccaattaccaattaccaaaaaacaatttcctctttaccacagcatattgcaggtaaatgaggaacaaagttgattttttcctaaaaatatattgatttttgtcaatataagtatagttttgtctatgaaattgtcaacttaggacttgctctatcttatgaggcaatttatcacttcttaacaagagttttatgacttgtataagtttgtatagattgcttgacaagattagctagttcctgcaattggctaattgcttctgcgccttctaacttcatcaattcgcggtcatcccgcatttcagtccaagtaattccgtaatctgatactaaaaagcgaataagatgattatctcctaaacttaccatgaacgaagcactgttcatttggtcgccacaggtgtagcaagaagctgggtagccattacgctctaaaactattgccaaggcttgcaagttcattaccaagtcttggacaaattccctatgttgatgtgccagtctcagaaacacttttttcctccagacaccacagtcatttgagtatcttttatattttctttagattttcccatcctttggtattgtatactatacaatgcctaacagatagttaagtctgtaattagttaccctgcttagggtagtggataactattctgtatgtcgtatcaaacaattcagtttgcaatatataaatctcagataaaactagcaaagttaacattgtctttatatgtttagcactagtctcctgagtttagtcagcaatcagcctttagcctaactcaaatctcctgctagtcaacccggtaacagttgcatattacacctttataagtagtgtttaatcgaattagcagtatttcttaactctagcgtaagtttttgcctttttcttcccatctctattttggtgaatttatgcttcatctactattgattaacaaagtgcaagctttctgaggctcacagtacctaaaaccttgcacaattttaatttgaatcatcctcaatcccttgatttctctgggttttacgtttattcagcaaacgtaagtaaattttgttaaattttatactaaattttagacacagaaaaccccaaatctacagacttcctctgaagatagcggaatcaaggatcaggtagtagccatttaggcaatagtttcgatgtgactggggactgggacaatatcttaggggttgctgagaaagtctttccgtgagggcataggagtcaggagtcaggagtcaggagtcaggagtcaggagtcaggagtcaggagtcaggagtcaggagtcaggagtcaggagtcaggagtcaggagatcaaggagtcaggagtcaggagtcaggagtcaggagtcaggagtcaggagtcaggagtcaggataataagaataaatttcttccctgttccctgttccctgttcccagtccccagtccccagtcaccagtcaccagtccccagtcaccagtcaccagtccccagtcaccagtcccctttttgtgaaatttcctcaaaaaaatctcaaaaaggggttttacccctcactgtaaaaatgttatactgtgatgagtagatgcaccctgatgatttggagagctattcaatggctctcttttttagtttgattgcaagtatttagccatcagtattcagccatcagcaagaaaggataagggagcatcccaattagacttttccagaaaagaaattatggaacctatttatgggggcagggcgaagcatttgggatatctagatgtctgatttttccgtcaaattattacccaaatgcttcgcccctacaacttattacaaattaatagattctattttggagaagtctaatgtgtaaatttatgttgatataaggaaataaacgctcccaggctttatatagtcgtagacagagtagttaggacatcaattaatcataaaactgtttagaccagactctaaattaatttctttctgactttgcgcctttgctcctttgtgtctttgcgcgaaacttgaatcaagatgtggttcatttacctgaaaatagcttttttcctattccctattccctattccctattccctgttccctgttccctattccctgttccctgttccctagccaaacagatatgataacaattcaaacggacatgatataaaatccaaaattatgacagactggaaagaaattacaggtggtgtgacagcacccaggggatataaagcagcaggtattaaagctgggttgaaaccttcgggattgccggatttagcgttaatattatcagatgtagatgcgatcgctgctggtgtatttaccacgagtcatgtgaaagccgcttgtgtagattattgtcgtcaacgtttacaaagcaagcataccactagagctatactgtgtaatgctggtcaagctaacgccgctacaggtagtcaaggggtgaaggatgcgttagaaagtgcagacttgttagcgaaagagttgaacatttccccagaatcaattttactcgcttccactggggtaataggtcaaagaataaaaatggatgctttgcgaaatgggatacccaagttagttgcagaactttccgaaactggatcggatgctgccgcaggagctattataaccacagatttggtaacaaaatccattgctttagaaaccactataggcgatcgcccggtgcgaattggtggtattgctaaaggttcaggaatgatacatcctaatatggccaccatgttggcttttgttacctgtgatgcggcagtatcatctacattatggcaacaaatgttaacacgggctgctgatagaagttttaattcgattacagttgatggtgatactagcaccaatgatagtttaatagccttagctaacggtgcatctcgtacccctgctattaccgaaaccggaccagaagcggaaaaattagaagcaatgttaaccgcagtctgtcaacatttagccaaggcgatcgcccgtgatggagaaggtgcaacttgtttggtagaagtgcaagtcactggtgcaaacgacgaaaccgcagcgcgacaaatagcgaaaaccattgctggatcgtccttagttaaatctgcaatctttggacgagatcccaactggggaaggatcgccggtgctgctggccgtgcaggagtaccctttgaacaagacaacctgaaaattaaaatcggcgattttgtactcatggaaaatgggcaacctttaccttttgataaagctgctgttaatgcttatttgaaacaaacgtccgcaggtgcttatctccaagaagacacagtattaatttccgttagtgttggacatggccacggaacaggtacagcttggggttgtgatctgagttatgactacgtgaaaattaacgccgaatatacaacatagggcttacggaaaaagtcttttcgtgaggataggggactggggactggggactggtgactggtgactggtgactggtgactggggactgg

SEQ ID NO: 46 - DNA, 41716 bp, Sphaerospermopsis sp. LEGE 00249
  LEGE00249_61
tgtctttgacaatcttgggaaatgaatttataatcatgatcaaatcaatattttgatatagcttgctcaaattttaatatattttgggctatttttatcacagatttcttaacattcaacacttctgataataaggttatgactttggtttagaaaagagtaaatttttaagatttgttaagtatactataccaatacctaaaaatcagattaatggtatataatgggatctgagatagttaaaatgattgccttaatatttcatgagggtataactatgaatgctttaactgtcaattttaaatcagtaatagaaatgactgatgagcagttttttgagctatgtcaaaacaaccgcgacttgagatttgaaagaaatgcaaatggagatttaattattatgccaccaactggaggagaaacgggaaatcgtaatggtagggtaaatcaacagttatttaattggactgatgttgatggtactgggatagcttttgattcttctacctgttttaaattgcctaatggtgcggatcgttctcctgatgcttcttggataaagttagaaagatgggatgctttaagtgatgaagaaaaacaaaagtttcctcctatttgtcctgattttgtgattgagttactttctcctagtgatagtttgaagactacacaagaaaagatgagggaatatatagataatggtgtgcgtttgggtatattaattaatcgtaaatctcgtcaggtggaaatttatagaccaggtcaggaggttgaggttttagattctcctgctacggtttcgggggaagatgtgttaaagggttttgttttgaacttggggatgatttggtaatatggaagaagaacaatatactccaattaaactaatcaacaccagcttagaagattctgaacaacatctttactcttttattgctgtagtagttaaaaaaaactggcttggttattcagctactggagggagttatactattcatttaacaaataagagattaatagtagagagtgatgtaaatgccgagtttctagaaaacttttatagcttaatacagtttatccctttagagggaacatattacgcaaaaggtaaagcaaaagaggcaaaaaagaaaatggattatttaaaatacacttctatctctataaactataatgatattgaaaagtttgaatttctaaccggaaatttcaaacttagttttgttcatattgtattgaaagtaaatttagataatagaaatatagaattttttaatgatttagggttagagtattttaagccttctcctgtaaaagaactggattttaatagcctgtgggaaaaattaggtcaaactgacttcaaaaatctaggaatacagtggtctgaacatatcaagaaaatgaaatctatagattcaacttctgactttatagatagggctaataatttattacacacatggatgtaaaagtaaatattgctaaaattttttaataactttcagcattctgaaccacaacagatgatttcactaaatgtataattacggagatttaatcaaattatgtataatcaaatcagtctttgggattatttaccagataccaataatctgactttagaaaatcagattcacaaaaaaacaattatttctagtgatggagaagtaatattatatccgattttttttagcaatcaagaaagcaatcagcttttttcagatttatattctagtgtgaactggaaacaagaaataatccaattttttggtaaacaaatgcctataccaagattgacagcatggtatggagatgaaggaaaatcttatacttattctggtatagaacaacatccagaaccttggaacacaacattaaaattaattaaatccaagattgaagaaatcgctcaagttaattttaatagtgttcttctcaatttatatcgtgatggtaaagacagtgtttcgtggcatagtgatgatgaaccagaattaggtaaaaatcccatcattgcttctgttagttttggtgcaactcgtcgtttttctttacgacataagcattcaaaaaatcacaaaatctccagatttttatgctcctaatcttcatcacacatttgagagttatcttgcatctctacaagattctgcaaaatacctatggaaatcctagattttgatgaattttatcggttgtattttcacagtgaggacattttccctctttttgcttattttcgatttctataactatttcatcatcagtaataaaatcataattaacaaccttgatatcttcaagattaataactttcgtaatcaagtgaagtaagggattagatggcatatttattaaatcactaatttttatttcaatctttttgaactttcttaatcttaattaattccaagactcttttgtgataatcacttcagactgttaattagtataacattatcgtccgctatccggtttatttatattattttaccataaccactctagtagagccgagattttatctagtattattaatgggaaaagaaaaacgttcagaacaacgtttaaaaaattcaaaagtgcaaataataaatggctttttaggtacaatgtataccctagctataattagttttatcctgggtagcctctacatcatacagaaagaattgaaaataaattcttttccatatcaccaaattgaaaaatttagagaatctttaaaataaaattctaaaatttagaatacagcaaattggcaggaaatagctcccagacttctcaaaaaagttgcgtatatggatatgatatgacgttcttgagagtctgagttgagagtctgagcaagactcctgtactaataaagcttaccaaaagtaacacttagtattttaatagacgaatttaaacagatattggaaaatttctctatctaatggaggaataaagatacaaacaataaatactaaataattaaatattccgatcacctgacgaactttaatacaatattcccccgttgatatctgatagcgggggctttttttatcaattttttatctaattataccaacaaataattttatctaaaaatttatctctctaaaggaggacttgataaatagcgaataattattaaatattaaatagcccgattaccctaccggactttagctccaaaccccctcttgttattaaccgttcaagagggggctttattcagatatcaattgataattgacaattgaaaattgataattgtttgattgcagtttaaaacctatcctttccatgaaaatgtggctgtctattttcaatattggaatttttgaacatttatcatttatcatttatgagttgtgattaaggattacaatattcacataatcccggatctgcaaactgtttaccatcaggatataattttttctctatgaaattacatttgcaacattgataaattaccgccatagttaataaagttggttgatggcaactttcacaaggtaaacctttaattttttgagttatactaaatccaggggtagaacattgaggacaacaactattaattttattcagcaaatcttgggtagctttttcgatattcttcatccgcattggattataaagtgcccgcatatcagtttctatatgtaaattaccatcgggggaattattgaaagcgaaattcacagcttcctgtaatttttctgtggtagttatacctttaataatttcaagattttcaggatttgatttttcaaaccaaaccactaaaccatgttcagggaaaccgactttttcagcaaattcttctgcttctgctaaactgctaataactcgatgattaaagttagtatcagtagaaaaaacttccccaacaatttctaattttttttcttgatctaaaaaaacaataatttctctgttagcataaatataaggaaaactgggatgaggtgcaaaactcccttcactagcaatagctatcttttcccctgtcatctccatagctttttgtgcttttaattttgcagtggcaatttgtgtatctgggcgttttatttctctagtaaatgtgccaaaaacatcggtgttaaaatcctgtggtacaataaccttaattcctaattcttgttgtaataatggggcaattactttttctttatggtgcatagttgcgatcacagccacacggttattaaagagatttttcaataattgctttgtcattacggttgagactccctgataaataatattacagaagattgcagatcaatcaggtacagaatcaaaggtaaaacctagatataaagagagagggcaaccacagggggtttgcccctactgactcctgactcctgaatcttacatttttatggtgggcaatgcccacctcaaaacttaactttgcgcttggggaacttgattattttgattaacttgattcatttctgccaacattttttctttattgcgtctgcgaattttggcatacatttgaatactagcagccatgaaaatcactaaaccaaaaattaaccaagcagtgatatctgtgggtagattattcttgaaaatagccaacatgacaatgacaactaataacaaagtcggtgcttcatttaaagcccttaattgttgtccactccacttacattcatcggcggctaactgtttcattaatctaccacaataatgatgatagattaataaaatacccacaaagcctaatttaaaatgtaaccaagtttcttttaacaagtctgggttagtggaaagaataccaatggccatcgctaccgtgacgatcattccggggatggtaataatatggtaaagacgtttttccatcagttgatactggtttttgagtatcgtttttgcgggttctggttcttggttcgcttctgtgtggtaaataaataaacgcaccaggtagaataaccctgcaaaccaaactacaaaaccaataatgtgaaaggctttaaaccatgaataagccatgaattgtcacctaccttagtcaatttacagatgattgcatttactcttattatcaggttacggcaattattgacaaggttgcagattatcgcggtaattagtaattgataattggtaatcaattatttctgtcacctgtcacctgtcacctgtcacctgtcacctgctatgacgacgcacaaagggtaacaggtcttgtaaaatcacttcatgataatgttcttggggataatgtcccaccttatgtaacttaattatgtctccatcgggtacagatttcacaaaactttcagccatatctaaagataaccaagggtcaatgattccccattgtactaaaatcggtttttgccattctttaaaacctgtttcaatttctgacatggcttgatccagttgcaaatttctaattgttgatagtaaactgcgaccagatgctgaagttttcaagaacggttttctataaacatctaaatcttgatcttcgatgcgataacgacatccaccttctaaggttctatccactagtaagggatcttgtgtcatcatttcccctgctaatggtaaacccatttgttgaattttccaaggtagtttagcagatgtagaaatgggagcatttaaaatagcaatgttggcgattttttcaggatttttcaaggcatattgtaaaccaactgaacctaaaaatccctgcacaactaaggaaaaacgttctaattctatagcttgaataaagtcatctaaagctttgataaatgcgtcgggagtgtaagcaaaatcgcgtttttctggtttggcagaaaagccgtatccaatccaatctggtgcgatcgctcttgttccctgtgctgccaaagctggtataatatttctccagctataactttgggaaactatgccgtgtagtaataccactggtaataaatcacttcgtccaatgggttgggcttcccgataataccattctaaggaatttactgttatcttatgttcttttattgacactttatgttccgatcctgaaaatacaatgatatagatccccgacttctaacattaatttatcatttattgtcaagactaaaaaacaagtagggtattattgacttttatttgacaacctgataaaataagcagctattgagagatatcataaaacagttaaatattttttgtcagaataatgaattaataaaaattaatacttgttcctgttgtgcagctgttaaattgtctagtttttctaaaatagattttttgttttccagtgctggattcatcatgaaaatcctcatcatttgtaaaaaaaatcttctttaatcatataggcatccgcttttatttgtgaaaatatcctaattttttaattgattctatcctgtaaatcctttaatcctggatatcttgattctgaaaatctgcgtttatccgcgtttatgtatttatcctgcaaacaaagattctaaatcttgacgaccattgacaattctgagaatttctacatgatcatcaacaagttgataaagaatgatgtaaccattaagaggtattccccgcattccttttctgatgtgttcgtaactacgccccatttggggaaattgcagcaagttttcacactttctcgtaaattcttgaaaaatcttttctcctgtttcaatatttctagttaaaaaatattcggaaatgctatctaaatcttttattgcttgaggtgaaattaaacattgattcattttttcgcctcacgcgcatggcgaaatttggcttgcatttgttcaatgactgtttctaaaggaactccttcacctcgttctaattctgctgcggcttcgttgactttaattctcacatcttctacccattcttcatattctttttgtgtttcttgtaacaattgtaatgcttgattaattactgcttgagcatcaggaaatttaccttgtgctagttgggttttaataaactgttcttgttctgggtttagggtaatattcatggtttgtcttctgtgattgataatttttattataaacaatatgtaacttgggttagttccaccacgacaagcatattcccattcagcctctagtctctagttcccatgctctgagtgagcaagtcctaagttgacaatttcatagacaaaactatacttatatttattgacaaaaatcaatatatttttaggaaaaaatcaactacttgatatataatacggtgatatcaagtattgaattgagactattgccgacgcgaaaaccaagcaatgatggtggtagtctttttcagaaacttaattggaacacaatcgcgtctggctaaggcgtgaaagtctactgagggataactgctcccatgctcccgttgaagtagaaagtaaagtctagttttgtctaggttttatatagcagaacacagttaggggttatgcctcaatgataactggaggtagaacctcctagatcgcattaccagtctctgactgagaacgagaaaacgagaaacaaaaatagttttactcctgactcctgtacgggcgttcgcgaagcgtgctggaagcatcagcatgcggacgaccaattatcaatttttgtccaaaactaagctgttgtgcatttaatttgtataagtggaacaggcatcttgcctgttaaacaagagttcagaatattaggattatacaatttagctgtgtaacagcttattttccgaatgcttcgcccctacgactcctgctgtaaaagaagattgttctagaattacaattaactgtgttctctaatttaaccgaatctgtgactactactcccctttcccccaacttctcacaaaccgctgctgttcccgatagcttaggacgttttggacgctttggtggtaaatatgttcctgaaactttaatgccggctttagctgaactggaaacagcttatcaccaataccgtaatgatcctgattttcaagcagaattacaaggtttactgcgagattacgtaggacgcgctacccctttatactttgctgaaagactcaccgcccattatgcccgtcctgatggcacaggagcgcaaatttacttaaaacgcgaagatttaaatcatacaggcgctcataaaattaataatgcccttggtcaagtattattagcaaagcgcatgggtaagcagcgcattattgctgaaacaggtgcaggacaacatggggtagctacagctaccgtttgcgctcgttttggtttgcaatgtattatttacatgggtgttcacgacatggaacgccaatccttaaatgtgtttagaatgcgcttgatgggggcggaagttcgtggtgtggcagcaggtacgggaactcttaaagatgccacttctgaagccatccgcgactgggtaacgaatgtagaaactactcattatatcctgggttctgtagctggtccccatccttacccgatgatagtccgggattttcacgcggttattggccaggaaactcgcgctcaagcaatggaaaaatggggtggtttacctgatattctcatggcctgtgtgggtggtggttctaatgcaatgggacttttttatgagtttgttaaagaaccatcggtgcggttaataggtgtggaagctgctggtgaaggtgtgaatactggtaaacacgccgctaccttgacaaaaggacaagttggtgtattgcatggggcaatgagttatctgttacaagataatgatggacaggtgattgaaccccattccattagtgcaggtttggattatcctggtgttggtccagaacacagctatatgaaggatattggcagggctgaatattatagtgtgacagatgctgaagctttagaggcatttcaacgcttatcccggttagagggaattatacctgctttggaaacatctcatgcgatcgcctatttagaaactttatgtcctcaacttacaggcagtccccggattgtgattaactgctctggtagaggtgataaggatgtgcaaacagctgctaaattcttaattcaaggctgataattaatcatgttgagaaatactatttcagctattggtgcaggtttcttagttttagtcagtggtgggatggctagttctgctcccagtccatcttttatatccaatgacagctacaaagtagcacaaactaatgttaatactgctgctatagaagcctctgttttccaacaaataaaccagtaccgatcctcccaaaatttacccccattgactcgtaattctcgtattgatcagcaagcaaaaattcacagtcaaaacatggctagtggtaaagttacctttagtcatgatggatttcaagcacgagtcagagcgattggtattcctttcagtagagttgcggaaaatgtggcttacaacaaaggttctacagatcctgcaaccaccgctgtacaaggctggttaaagagttcaggacatctagctaacattagaggtaattataacctcacaggaattggtgtggcgagtaacaggaaaggacaaatttttttcacacaaattttcctcacatcaagataaattttagtacctgattggtgattggtgattggtgattggtaattatttggtttcgtaatcccaataatttcaattgtcaattatcaattatttttgcatctgtcaatggatactattttttatatatttttttgactaaaaatgtagtgacaataacactttgtgaggtgaagcatctaccataggcatatactggatactggatttttttaaagttatgaaattggcagacttttagcaaaataaaatgtcattttcaggaaagtgaactcaaaaatatgaattatagaaggtgacaggtaatgggtcataggtaatgggtaataggtaataggtaagatttctcctgactcctgtacgggcgaagcattcggaaaataggcttggacaaaatttataattagtcgcccgaatgcttcgcccctacgactcctgacacctactgtaattcttcagttcaccaatacttgacagtatcctggtacttattctgtacatcagaagatagagtatatgtctgataaatccatacactacctaattctctatgttccgacaaactgcttttggcatggctttaagtacgcttgtccttgctagtggattgatgactgatcctgttcccagcaataattctgctaaaaaaatcactcacactcagtcatttaatacttctagtcaggcggctattttgaatcttggttctgaaaatgctactttagaaaaattagtttttgagcaaattaatcaatatcgtgtttctcaaggattatcaaagctcaccttaaatgcaagtatcactcagcaagcaagaattcacagtcagaacatggctaatggtatagtgaaatttagtcatcatggattggaacaacgagttaaagccattcctcttaaatatgacaatgcagccgaaaatgtggctttcaacgtgggatatagtgatccagcaaagcaagctgtgattggttggctcaacagtcctggacatttgcataatattcaaggaaattttaaattgacaggggtgggagtggcgactaatgccaaaggtgaagtttatctcacacaaatatttgtcaataccaaatagattgtcttactgattttttgcacaatttgcataataataaattagtgtctgatccagtaattttttaactgatagacactatcattcatttgggaacgattgatgagattagatgattttagggttagtgacggtgatatagatgctgctaccctcgcggagtatttaaaatctgaagctctggctgtagacacggaaacaatgggattattaccacaacgcgatcgcttgtgtcttgttcagttgtgcaacccagaaggaaaagtcaccgctatccgcatcgctaaaggacaaacagaagctccaaatttaaaacaacttttggaagcaacccacatcctcaaagtatttcactttgcacggtttgatattgctaccttacgccacaatcttaatattcaggttcaacctgttttttgtactaaaattgctagtaagttagcccgcacctacactaaccgtcatggtttgaaagatgtagtacaggaattagaacaagtagaactagacaaaagctctcaaagttctgattgggggaatgctgctaatttatcggaggctcaattaagttacgctgctaatgatgtccgctacttattgagcattcaagaaaaactaacgcaaatgctacaacgagaagaacgttggcaactagcgcaagagtgctttcaagttctaccaacattggtttctttggatttattacaattcaaagatttatttgaacattaattggtaattggtaattggtagttggtaattggaattattattattattgattttcttatctgcccaatgcccaatgcccaatgcctaatgccctatttacttctgttgattttccataatcttttggatgcgagagacaacattgtaatcatctgcacctgcgggagttcttgattcgataataccttctgtttgtccaccaattgctttccatgctcccaaaccaccttttaattctgatacgtgtacaaatcccgcagcacgcaatctttgggcagcttgagcagtttgtccctcatcagtgccgtaaacataaatatcacggcttttttgtaaagaaatttctgcacgatctgttagttcatctataggcataggcattgcgcccataatatgaccttggttgtaggttgagcgatcgcggacatccaaaattgtaaatgctggttcgccccattctagacgagatttaactacatgaacatccgattctacttctatgggtggctgttgaggaataatcccacccatcaaattattagtcataagttttatccgttttaacctattcaatttcaacttcaatcaacttagtcaacaataaattaacaaacaaagtctagttaatttgtctggcttgagtatgaaaatataaaaattttcctgaataaatcctgaataaatcctgaataaatcttgtaaaaatctatctttagatatattcgattcctcatatcgtcatcagtaaaatttcagtacagatacttcggtataacaccacaattgatttatattttatacattttttttttcaaaaaataccaaaatcatacattaccgatacattttataaggattattataaagtttgcataaacttcaggaaaaattcagtgtatacaaggactaaagcatttttcctacttatttatttagccaggagctaagatactccttaaacacaacatctcaaagcatctgtcaccacagaaaatcgccaaatcaatcaataaactgcattggactatggataagcttgccacgaatattcccaagattatgattgtagatgacgatttcagtgtgagaaatctcgtctaccgttttctgagtcgaaaataccaaatagaatcggcctcagatggtaaaagtgctatggcattatttgatcaattcaatccagccttggtaattctggattggaatttgccagatgccaatggctataaactttgtcaagaaatgcaaagtcgcaccaatgttttagttttgatactcactagccggaatgatgaagctgataaaattaaaattctggccgcaggtgcagatgatttcatgactaagccatttagcctagcagaagtggaagtcagagttgaagcacttttaagacgcattcgttatatccatcctcatcaatcacaacgtcttgtttttcaacaattagcaattaacccagaaggtagagaggtaaaattgaatgataaacctttagctttaacggctttagagtttaatattttacattttttagctagtcatccaggacaagcttggagtcgtccccaactaattcagaaaatttggggttgtgactatgtaggagatggaagggttgtagatgtgcatattggtcaattacgtaaaaaaatggaagttgattcgagtacaccagagtttatcaaaacggtacgcggctatggttataagtttgaaccaccagaaggtaacaaagtttaacctctccgtaagtattcagctatcagtaatcagccaatagccagtattcagacgttttaattttaggaatgttatctgcatctgctttttttcattctttgtatttcaatcttttaggtactgagggaaaccgatgactgaatgctaaatgcttacactccagagcaaaaacaaatcattaaaatattggtgcgtttatcaattaacaatctggttgtacatctgaatttaccaaggatttttattggggcttgatcacagatttagcatgagttggaattattaaggctaaagtcggtcagggaatttgtatctactcaagcctcagagcaattttagattttggattttggattttggattttagattttgaagatttttaaaatttccgctaataagttattatagaactataaaatctaaattgactatatactatatattcttatcaatatagatgccattaaagaaagtaatgaaaatcacagttatgacttttaacctccgctgcgacaaaccagatccgggggtacgtcagtgggaaaagcgtgtaggtgcgatcgctgctgttattcaacactatcaaccagatgtagtgggtacacaggaaggtaaaccccatcaactgaaggatttacaagcacttttaccagaatataaatttgttggtggcgatcgctctggtacaggagaagatgaacactgtgcaattttctatcaacctgaacttttaaaactgcaagaaactcaagatttttacctcagcgatactccagaaattcctggtagtattacttggggaactcgtttaccacgcatggcaacttgggctaattttcaggtgggtgatcctagtatttctctaactattgttaatactcatttagatcatgaaattgctaaagcgagggagttgggtgcaggtttgctgagtctgcgtttaatgggttttcctgctgaaaattatttactgttaacaggagattttaacgctcattccagaactttagaacgaataattttagctgataattttagaatacaagatactttagcaaatctgccgttagcagaacaaaaaacttttcataattttactggtgaacccgtggatgctagggatacaatttatggcgatcgccgttttcacatcgaacaagtaatcattgacaataaacaatgggaaagtatttggccttctgatcattttccggtgattgtgaagttaagcatcaggaatagggaatagtagtcaaaaattaagcagacttaacggatactgctaactgtaaccctaaagcatctaataaggtacgtaaacaataaaattcaatttctccttgctcagataatttctgggctaggttctcataacattgctgtactgtttttgatagtttctcaattccaccttgagcttcaataacatttttaagtgccttatttaacattttaggatcgccttcttctagaacaacttcaatataagtagctgcttccagtggatcttttaagtcttggattagtttttcatggtagctagtgcttttagacatccttttcctctccgcgtctctgcgcctctgcgtgaggtaaactttgcctttgcttcactaactccaccgctaattgtatcgcagctttcatactggttgcatcagcaataccttttccggcaatatcaaaagctgttccatgatctggggaagttctcacaaacggtaaaccaatggtagtatttaccgcccgatcaaaagccattaattttaccggaattaaaccttgatcatgataaagtgctaaataagcatgagcaacatttttagaaacatttttaagatcagaattaccataccaagcttgacccggtttcacccacattgtatccggtggtatgggtccttctagttgtaaatgcggtcgtttttgtctttctgcttttaaccaagggattaaccaatctatttcttctgttcctaattgtcccatttctccactgtggggatttaaaccagcgatcgcaattttcccatttttaatcccaaaatctctttctaaacattctgctaataaatctaatttttttgttaataattccggtgttaagacttgagatacttgacataatggaatatgtgtggtagcaagtaaagcccgtaaagtccaacctgtcaaaggcgatcgcccgacaaacaacattccaaaacgttctacacctgctttctcggctaaaagttcggtttgtcccggataatcaaaaccagcggctttccaagctgatttagcgataggtgctgtgacaataccatcaaaatcacctgctaaagtttgagatatggcatattccatataagcaaaactggccgcaccactagcagcattacccaccccagtaataatttcacctgagtttggtacatcaacatcaatcacatttaactcatcaggatttgccaaagctagtaaatcatcagtattagctgtcaaatttttataagctttactaagtaaattacggctaccaacaacgacaaaataacagttttggctaacttctgaatcagccaaagcctttaaagttacctctgctccaataccggcaggatctcctagtgtgattgctaaacgtggacgttgattagtcattggtgattggtgattggtcattggtgattggtgactgggaaaatagtttataacctcgtagctacccagtcccgatttcaattagctgctaaactattttagaattatttagacaggtctaatcctcaagacagttgaagacctggtttacctaagttaccagactagcaaaaatgagatttgagcgatcaagttaagttaagcagtctcataaacggtaaacatctacaaaccattcagttcacaaaggagaaacacagcaaatgggcggcgaaatcttaaatgcagctatgctatctttcggcttaatcttcgtaggttggggtctcggcgctttattgctgaaaattcaaggcgctgaagaataagcaaggggcagggggcagaaggcaggagttttttattttggattttggattttggattgtttttgtgatctccaatctaaaatctaaaatctaaaattttcttccccagtccccagcgatgcactgagcttgtcgaagtgtccccagtccccaatccccagcctccttaaaaaaaatgtaaacttttatttctataactaaactctgttaagatttttatcataaaacattaaaatatataacgaccctcatgacattattaattgtcggtgctactggcacattaggaagacaagtagctcgtcgtgctattgacgaggggtacaaagtacgctgcttagttcgcagtaccaaaaaagctgcatttctcaaagagtggggtgcagaactggtgaaaggcgacttgtgctatcccgaaaccctggtaggagcattagaaggtgtaaacgaagtcattgatgcttccacatctcgcgctacagattcattaacaattaaacaggtagattgggaaggtaaggtagcattaattcaagctgcaaaagctgcgggtgtagagcattttatctttttctctattcttgatgctgataaatatcccaatgtaccgctaatggaaatcaagcgatgtacagaattatttttagctgaatctggcttaaattacactattttaagattagctgggtttatgcaaggcttaattggtcaatatggcatacccattttggaaaatcagccggtgtgggtgacaggttcatcttccccggtggcttatatggatactcaagatattgctaaatttgcgattcgggcattgagtgtaccagaaacccaaaaacaaactttccctgtggtgggtactcgtgcttggagtgcagaagaaataataaatatttgtgaacgtttatcaggaaaagatgcgagagtaacacggatgcctattggcttgttgcgtggtgttcaaagcttactgcggtttttccaatggggatggaatgtagctgatagattggctttttccgaagttttagccagtggtaaaccattaaatgcgccaatggatgaagtatatacagtgtttggcttggagcaacaacagacagccacagtagaaacttacttgcaagagtatttcagccggattatgaaaaagctgaaagagctagactacgagaaaaccaagagcaaaaagaaaaaagataaaaaaacgccttttaaacagtcatcaaaagctaatagtcaataaaatcccagatgttgattacaatatcccaaaatatgtaaccattactaaagaaaaagcatagcctacttggatatttgaatgtgccgaaagctggcattatctacaacgacgttaaaccgatagcaactagaaccgctatcgaactcaaagaccagttaaccgcagctggttgggatgtgtgtgtgacaacaagcatcggtggtatactgggctactctaatcctgatggtcctgtatgccacaccccagtggaagctctcacacctcccggttttgatcccagtatggagtttgcagtggtattagggggagatggaactgttttagcagcttcccgtcaagttgccccctgtaggataccattgttaactgtgaatactggtcacatgggatttttgacagaagcttaccttaaccagcttccccaagctatagaacaggtaatgacaggtaagtatgaaatcgaagaacgaaccatgctcaatgtcaaagtgctacggggggaaactgtcttatgggaagctttatgtttaaatgaaatggtgttacatcgagaaccattaacttcgatgtgccattttgaaattgaaattggtcatcatgcagcagtggatattgcggccgatggtgtaattgtttccacgccaacgggttcaactgcgtattcattaagtgctggcggaccagtgattactcctggtgtgccagtgttacagttagtaccaatttgtccccactctctggcttccagggctttggtatttcctaacaatgaacctgtgaacatctatccagtcaatgtaccccggatggtgatggtggtagatggtaacggtgggtgttatgtatttccagatgatcgggtatatttagagcgatcgcaacataaggctaggtttattcgcttacaatcaccagagtttttccgcgttttacgggaaaaattaggttggggactaccacatattgctaaacccaattctgtagaattgccataattatcagtagtcagttgtcagttgtcaatacaggttttcttcgacaattggtagttaagcaattgtattgggttgtattgggaatgagtaattaaaattgcatcttgggacggtcgaggtttgataatggaacgtgctaaaacatctacaatatcatttttagcaacaggctattttccgaatgcttcgcccctacttcgcccctacttcgcccgtacaggagtcaggagtaaaaccctattgtagtaggagtttcatgataaattgatgtcctaactactctgtctacggaagcacaggaaaaaaataccaacaatgcaaccaagctaatatttctttatggtaatattcccaatacattcaaatctttgattttgccggaattttatttattgatttttgtttagttaaatatagttgacaattttttaattttataatgtagtcatggttaatcatcctagaggaactctctgagcgtgttagcttttttttctgccttgttgtttttaccagaatcaatagttattagggatgtagaatgaaaagattaactttttatatagttgtgttacatagtttatttttaggtatgggaactgcttgcgcccagtcattagagacaaaggcaaaggaaaatctggcaacttcagatcaaataactttaccagcatcgcaactatgggtaattaatcaaaataaacaggtacaaaaacaaccgtttatgtgggtggtagaagatccaaaaaaagccagacaacaaccatttttacaacttgcgaaaaatgccaataaaccaactaaaaaacctggagatatcactaaaccatataaaaatgagaatttagaagaatttgatgatgttgtcaaagacactcaaaaattagagggtatatttactctttatcgccaaaaagaaaataataaaatatatttagaaattaaaccagaacaactaaataaaaacttcttagctacagctactttggaatctggtattggtgaaaaaggtatttatagtggtttaccgttgcaagattttctattttattttcaacgcatagataatactttgcaatttgtggtgcggaatgtgaattttcggactcgtgaaggagatccacaagctcgttctttgcgccgttcttttagtgattctgttctctataatttgccgattaaaagtattcatccccaacggaaaacaatactcattgatttaggtgatttactcttaacagatttagcaggattatctgcgagtttggaattatcagcaagtccagaacaagcctattttggtaatgctaaagtttttccccataatctagaagtgcaatcaattttcaattttacaggcgctggcggaaatctgagtgtactggctgatagtcgtggctttactctcaagctgcactatagtatttctcaactgcctaataataattatcaaccgcgtttagcagatgagcgtgtgggatattttatcactgcatatcaagatttatctagggatgatcgtcatgataattttgtccgttatattaatcgctggaatttagaaaaacaagaccccaaagcggaaatttctcccccaaaaaaaccgatagttttctggattgataacgctgttcctttggaatatcgtgatgcgattagagcaggggtattaatgtggaatcaagcttttttgcaggcgggttttaaggatgcgattgaagttaaacaaatgccagataatgctacctgggatgcggctgatattaggtataatacaattcgctggattaatacggtagatggctattttgcccttggtccctcccgtgttaatcctttgacgggagaaattttggatgctgatattctggtagatgctagttttgtgagggctttaaaaaatgaatatcggcaaattattctacccaagcaaacacaaaaacaaacacaaacgccaactactttatctacattgatgcaaaatcgccttctttgtggtaaaaatgatcaaaaaaataaagggttaattggcaatttatctaaactagcgggagagtatgatttatgctatgggatagaatctgctaatcaatttgcttttggtgctttggctatgtcactattagcaaatactgttcctagtcgggatcagatgcaagattatattcatcaatatttacgtttaattattgcccatgaagtaggccatactttaggtttgcggcataattttcgcggtagcaatcttttacctccagaggagatgaataatcgagaaattactagcactaagggtttaactgcttcagtgatggattatattcctcctaatattgcccctcgtggtacagttcagggggattattttcctgataaagtgggaagttatgatatttgggcaatacagtatggttatactccttctggggcaaaaagtaccattgcagaaaaatcatttttggcagaaatagcgaaattatcagaaaacccagagttgagttattctcctgatgaagatacatcggaaattgatcctacatctgcaccttgggataatagcggtaatgtgctagtttattctcgctggcagttggataattcccgtgtgatgtgggatcgtttaaatcagggttatttaatgtatggtgatagttacagcgatttaactgatcagtttagtaccatttttggtaattatttacagcagttaagttacactattaaatacattggtggtcagtctttttacagagttaatccggttgataataaaggcagattaccatttgtggcggttcctgtggaaaaacaaagacaggcattagcaactttgcaagagtatgtttttgatgaagaggcgctgaaattttcaccgaaactactgaataaattagtaccttctcgttggtatcactggggaagtacacctgtcacggggcgtttagatttcccggttcatgatttggtgttgtttgtacagagtgcggttttgagtgatttactttcaagcgatcgcctgactcgcattaaggatatcgaacttaaaagcaaacccggtgaagcactgactttacctgaagtatttaatactttgcaaatgggaatttggacggaggttttacaaccaaaaggaaaattagaaatttctagtttacgacggggtttacaacggcaatatgtcaactttttgacagcgatggtattacggaaagtagatgtaccagaagatgctcgcactttagcatggtataagctcaaacaattagatcaccaactcaaacgggtgaggtctgatgatgagtatacaaaagcgcatttactggaaacccgcgatcgcattgaaaaagctttaaatgctccattgcaggggaactaggggactggggacacttcgacaagctcagtgcatccctggggactggggacagaaagaagtttagcaataaccaattacccattaccaattacctatcaccagcctaaacaaataatatatttatttaaacagacatgatttcacccattaatttatttgagtatgaagagttagcaaaaacccatctacccaaaatggcgtttgattattacagtagtggtgcatgggatgaaatcactttaaaagataatcgcgctgcttttacacgggtgaaactgcgtcctaaaatgctcgttgatgtcagtgaaattaacttgacaactgaagttttaggtgcatcgttgcagttacctctgatgattgcacctatggcttttcagtgtttagcccatccagatggggaaattgctacagcaaaagccgcagtttccgcaggtgtggttatggtgctgagtaccttatctactaagagtttagaagatgtggcaatggttgatgatggtttgcgctggtttcaactttacattcacaaagatcggggtttaactcatgctttggtagaaagagcttatgcagcaggttacaaggcactttgtttaactgtggatgcgccagtgttgggaaaaagagagcgagatcaacgcaatgaatttaccttaccccctggtttacatcctgctaatttaaccaaaatgtcaggtttagacattccccaagaaaaaggcgagtctggtttattaacttattttgcccagcagattaatccggctttgacttggaaggatttagaatggttaaaatctttaagtcctttaccgttagttttgaaaggaattttacggggtgatgatgcggtgagggcggtggaatatggcgcacaggggattgtggtttctaatcatggtggtagacaattagatggggcgatcgcttccttggatgctttaccggaaatagtcgccgcagtggatggtaaagcggaagtcttgttagatgggggtattcgtcggggtactgatattcttaaagctttagcgttaggggcgaaagcggttttgatcggtcgtccggtattatggggattatcggtatctggagaaacgggagtagctgatattatcaacctactcaaagaggaactaactacagcaatggctctcagtggttgtgctagactagaggatatagattctagtttggtgatttgtcgttagtggttgtggaaaaaaaaggcaaaaaatttttttccaaaccccttgccaaattagaagaataggttataatagaaaagttgctaccaagggcgagtggcgaaactggtagacgcaccacactcaaaatgtggcgaccttgcggtcataggagttcgattctcctcttgcccattgcttactagataagggttttagggtttttgggttagaaaatttaaagttctaaaaactaagtttctaccaaaattaccccaaaaaaaattacatcagtgtcagtaagtagaaaatactaactaacatagttataccagataattgaaacctttactatgtatacattgtaggtattttggctacaagctaggataactacctgatcagtgtatatcaaggtattatagaaaatacatgatgcggttaattttaataggaattttgattttattaacagcttgtagtagtattgcattgcaaccgacttatgaattagttgaaaaagccattgctattcaactagaacaaactcaacagcaacttacacaaaagctagatttagactttcaaaaatttgagattaagcaagtagtaattacgcaagaagaacctttaaccattgaatatttaccagcttatcatgtccagggaacttatgatttaactgttaaattacccaaaaaacaaatcactcaaccacaaaaaccttttgatatttatttacaaattcaacgagaaggtaaaagttggcgtttgctacttcctgaaaaaactaataacgataaaccatcaatttggcatagttatcaattgatgattgatgattgacaattgataatttctcgtttgtagtctgagactgggaacgagataaaaagagagagataaaattctgactccttgaactcctgactcctgactttttaataattctaattttgataaactctacctttccaagcacctccttttccttgccaatgtcggttagcagaatctaatgtcattaaagtatataaaaaggcaatgataggtaaacaaaaagctaaccaaagaggacatttataaaaggcgattatgggaaaatatgcgaatgtcattaatagcgatatgagtagacctgtaatgattattagcagattacccataattaaacctaagataattcctaaaattggcagcatataaactataaacattcctaagacacttcccactaacaacaaaggagaataatttagttgtgtgtaggcgctacgggctaccatattccaaatagtttctagggaatcataaggacgcaaactataagttaaagcatctaatcccacccaaattttaccttgatgagatttcacgactttggctaaagaacaatcatcaattaatgcgtgacgaattatttgtagtccgcctattttttctagggtttctcgacgaattaaaatacaaccaccagcagcagcagcaatagattttttcgggttatttacccaacgaaaagggtaaagtttttgaaagaaaaagacaaaggcaggtattaataattgttcccaaaaactttgacagcgcagttttaccatgagagatactaagtctaaattctctgtttctgctttggcaactaatcgccgtaaattactaatatcatgttctatatctgcatctgttagtaataaatagtcaggtagttgtaaagatgtttcatgaaacgtctctacagcaacttttacaccttgttccattgcccaaagtttaccactccaaccatgaggtaaatctgcactataaataatatgtaattgttcgagtttatcaactgcgtaagctactccttgggcaaaattcgctgtaccatcggtactttgatcatctactaaaaatacatgaaaattaccaggatagtcttgtaaaaggagcgatcgcaaacttacaggaattacatcagcttcattcctagctggaactactacacacactgtaggtaaagattgtaatttatttgctgtggtttttaactgttgatctacccgccaaaactgcccccaaaacaacagtaaaaataaccaaattgctaaagataaaaccatcaaacccgctaaaatttctaccataacttctaccataactgctgaggtcaggattttatgcaaacacaagacagggtaaaagtcaaggaaattacagaagcgatcgccgctagtcaaaaacatctgctgtcaattcaaaaacccgatggttattggtgggcggaattagaatcaaatgttaccatcactgcggaaactgtactgttacataaaatttggggaacagataaaactcgacctttgcataaggttgaaaactatttgcgatcgcaacaaaaagagcatggaggatgggaactattttatggtgatgggggagaactcagtaccactgtagaagcttacatggccttgcggttattaggagtacctgcaaccgatcccgcactcataaaagcaaagtctttaattttgcaaaaaggtggaattagcaaaacccgcatttttactaaattacatttagcattaataggttgttataattggcgtggactgccatcattaccaccttgggtaatgctattacctgaaaattttcccttcaatatttatgaactttcaagctgggcgcgttctagtaccgtgccattattaatagtctttgaccagaaacctgtctttgaaattgacaaccccatcaacctagatgaattatataccgaaggtgtgaataatgtcaaatgggaattaccaaaaaataatgattggtcggatatatttaccattttggatgacgggtttaaattagcagaaagtttaaattttgtaccttttcgagaagaaggaatccaagctgctgaaaaatggattttagaacgtcaagaagctacaggagactgggggggaattattcccgctatgttaaattctctgttagctttaaaatgtctagattacgacgctaacaatccgattatttaccggggtttaaaagcagttgataatttcgccatggaaacagaaaataattactgcattcaaccttgtgtttctcccgtatgggatacagcctgggcaattcgcgccttaattgattcaggttttgaggcagatcatccagtaatagtaaaagctggagaatggttaatagacaaacaaatacttgattatggtgattggtttgtcaaaaataaacaaggaaaacccggtgcttgggcgtttgaatttgataaccgcttttatcccgatgtggatgattctgctgtagttgtcatggctttgcatcaggcaaaattacccaatgaaaacctcaaaaaacaagctataaaaagagctttaaattggatagcatcaatgcaatgtcaaccgggaggatgggcagcttttgatattgataatcatcaagaatggctaaattctattccctatggtgacttgaaagctatgatagatccaaatactgccgatgtcaccgctagagtaatagaaatgttgggtgcttgtaacttatcaattcccgcagataagttagaaaaggcgttgaattatcttctcaatgaacaagaaacagaaggttgttggtttggacgttggggagtaaattatatttatggaacaagtggagttttatcagcattagcattaataaacccccaaaaatattgcagtgaaatagaacgaggtgcagcttggttagtgaaagtgcaaaactctgatggtggttggggagaaacttgttttagttacaatgatccgagtttaaaaggtaaaggagacagtaccgcatctcaaacagcttgggcgataattggattaattgcagcaggtaaagttaccggaaaatttgattttcagagtcttaaaaaaggggttaattatttgttagaaactcaaagttcacatggtacttgggatgaatcttactttacaggcacaggttttccttgtcatttttatctcaagtatcacctttatcaacagtattttcccttaattgctttgggaagatacagcagaatttagtagtcaggaagaagcactgcgttgaagagtaaaaatttcttgctgtataagttagatcctgtacctgattgaactgcaatttgctgtatcattgaattaataggtgtattaacactctgttaacctaagcatgagagtaatccctcatgctcggtttcaaaaccgtgggtgatgttttcagatcacatggattttttctaagttaaccttaactaagcacaaatgtgtttatatttagccttttgtaactcgattttcaaattctttgcaagtattttcgactatagcaagagcagatggataaatactatcatgctcttctttcagccaggctagaagtctagcaagctgggcgttccgtagatctaagtctgtctgaaaaattattgatgttgccattgcttgagcatattgaggtggatgaccttgctgtactaaagcatcaatcagagcggctaaggcttgctgtgacacagaagcagaagcattttctatagacataatttagggagaaataattgaatttgactaattataataatagatttcacccaatatttccattcctattgttcagtaattttaaattactcagtacctacatcaataattcctcgtaatttacttaaataacaatactgattatataagttaaaatctcagtatatattcgtcaaccaagtatttaagcacaaataaataatttttaaattgattagtctgaattgattatacttaaataatttttgctcacgaaaccaactgcaacgcatacagatcaaggtgaatagaataaatacttaaactcaatgtctttttattatacaaaagtttggctatttacagatcacagatactggtatgtgtagattaaggtaagttacaaaaaatctagtttactcctaatatatttatttttgtaacattgttgttaacacgggttataattaaaacattttttcataataaaatttacgtaaatatttgcgatcaatgtaatttaagagtaaaaattataactgaaaggcaattacacgtaaggacaaaaacataatttccttagccataaatttcttgatttttagttttttagccgggttggcattaaaaattgtcattgtcacagtcaagaaggatcagggaagagactcaagagaaaggttttgggtaaatttaatttttgttataatccgttacatattgagttataacttagtaataatgactgactttattctctactactgatttttttgccaggctctttacaaatagtaaaactagtgatattagtataaagagttcaagcgagtgtataacttactatcttgtaaatgttaaatgactccagtaagttaggttaacatcagaaaattctgggactaaacaaactggaatttcctagtgagactaactatatagtggtttaaccacatacataaagttgtctctatataacctagtaaataaaagatcaacctttataaaccttactgtagtcatgtttacaatgaaactattacaagatataagtaaatactcaaatcaacaacaatgaattaaggtacaaaacaatggcagttgaaaaaactaattcttcctccagcttggcagaagttattgatagaatcctagacaaaggtatcgttgtagatgcttgggttcgtgtttccttagttggtattgaattactagcagtagaagctagaatcgtaatcgcatctgtagaaacctacctgaaatatgcagaagctgtaggtttgactcagtctgctgcggtacctgcttaattttgaagtagatatgcaatgagtagaataattatccaattaaaggtaattattctgctaaacttagcttggcaatgccagaaaaatcagcaacaataaattaaggtgcaaaacaatggcagttgaaaaaactaattcttcctccagcttggcagaagttattgatagaatcctagacaaaggtatcgttgtagatgcttgggttcgtgtttccttagttggtattgaattactagcagtagaagctagaatcgtaatcgcatctgtagaaacctacctgaaatatgcagaagctgtaggtttgactcagtctgctgcggtacctgcttaattttgaagtagatatgcgatgagtagaataattatccaattaaaggtaattattctgctaaacttgacctggcaatgccagaaaaatcaacaacaatgaattaaggtgcaaaacaatggcagttgaaaaaactaattcttcctccagcttggcagaagttattgatagaatcctagacaaaggtatcgttgtagatgcttgggttcgtgtttccttggttggtattgaattactagcagtagaagctagaatcgtaatcgcatctgtagaaacctacctgaaatatgcagaagctgtaggtttgactcaatctgctgcggtacctgcttaatttttaagtagatatgcaatgagtagaataattatccaattaaaggtaattattctgctaaacttagcttggcaatgccaaaaaataaacaacaataaaaaattaaggtgcaaaacaatggcagttgaaaaaactaattcttcctccagcttggcagaagttattgatagaatcctagacaaaggtatcgttgtagatgcttgggttcgtgtttccttggttggtattgaattactagcagtagaagctagaatcgtaatcgcatctgtagaaacctacctgaaatatgcagaagctgtaggtttgactcaatctgctgcggtacctgcttaatttttaagtagatatgcaatgagtagaataattatccaattaaaggtaattattctgctaaacttagcttggcaatgccaaaaaataaacaacaataaaaaattaaggtgcaaaacaatggcagttgaaaaaactaattcttcctccagcttggcagaagttattgatagaatcctagacaaaggtatcgttgtagatgcttgggttcgtgtttccttggttggtattgaattactagcagtagaagctagaatcgtaatcgcatctgtagaaacctacctgaaatatgcagaagctgtaggtttgactcaatctgctgcggtacctgcttaatttttaagtagatatgcaatgagtagaataattatccaattaaaggtaattattctgctaaacttagcttggcaatgccaaaaaataaacaacaataaaaaattaaggtgcaaaacaatggcagttgaaaaaactaattcttcctccagcttggcagaagttattgatagaatcctagacaaaggtatcgttgtagatgcttgggttcgtgtttccttggttggtattgaattactagcagtagaagctagaatcgtaatcgcatctgtagaaacctacctgaaatatgcagaagctgtaggtttgactcagtctgctgcggtacctgcttaatttttaagtaaatgtccgagattaagaatttaattaggattaaattctagtaccatcactgcttttttaatgactttgatatgcggaaatatagttttcatgaaagcatatctattaaaaaagcagaaacacctgcaactacattcactgagtaaaaaactccggtgaatgtagttgataccagcttctaatttctaggagaacttcatggcggctttaatggaaagaatccggcaggagaataactcaatatttgaggaagtaaatttattcctgtctgagacaaaaagcaagcggtttactcaagccaaaaaacaagcggaagaactgcgtcaattccagcagcaactcaagcaaacaactgatgagtttttgacaaatgctgctaaagaacgtattgctcaaactaaccagcaagcaaaagagttggacgagttctatcagcaactcaagcaaacaaccgatgagtttttagcaaatgctgccaaaaaacgcattgctcaaactaaccagcaagcaaaagagttggacgagttctatcagcaactcaagcaagcaaccgatgagtttctagcaaatgctgctaaagagcgtatcgctaaagctgaggcacaagcgaaagagttgagtgagttccatcagcaacttgagcaaacaaccgatgaatttttagcaaatacggctaaagaacgtattgctaaatctgaggcacaagcgaaagagttgagtgagttccatcagcaacttgagcaaacaaccgatgaatttttagcaaatacggctaaagaacgtattgctaaagctaaggaacaaaagcagaatctgcgtcaattccgtcaggatttatttgcgagtgttattggcaattaccgtcgtaattaatactcacaatcctgctgactgttagataattgggctatatagtaattccccctaatccaatagttgtaaaactgtgaagatcagggggtgaataataaaaatcaacaatgagttttggcgttaaacaatgatagtctcagtttatacctggttcaagctaaaaacaacagctatttgaaaaataacttgactacagttatataactaagctctctgctggaaactatatagattaaacatagcacattccaattagaaaagatagcaatctttttcccttttttccaagttattttgcaactatcgtgaatttatgactatcatgaatatgaatcagaaaagagcagttcttcgtgttcgcccagggcagtttgtggtgacacctgctattgaaaaagtagcatctcgggctttactttatctcaagtcagggtttcccattcacttacggggtccagctggaacaggtaaaactactttagctctgcatttggctcattgtttagacaggccagtaatgttattgtttggagatgacgaatttaagagttcagatctgattggtagtgaatcgggatacactcacaaaaagttactcgataattatattcacagtgttgtaaaaattgaagacgaattcagacagaattgggtagattctcgactaactttagcttgtcgggaaggatttacattggtatatgatgaatttaatcgttcacgtcctgaagttaataacgtattgctttcagccttagaagaaaaaattctcagtcttccccctagcagtaatcaaccagaatatttaaatgttaatccccagtttcgggtaatttttacctctaatccagaagagtattgcggcgttcactctacacaagatgctttaatggatagattggtaactattaatatgccagaaccagacgagttaactcaaactgagatattaattcaaaaaacaaatctagatagagaatctgcttattttatcgtgcatttagttaaatcatttcgtcaggctacaggggctgaaaaaacttctggcttgcggtcttgtttaatgattggtaaagtttgtgcagataacggtattgtagcaacaccagaaaatgcggactttcgggatattgctatggatattttattcaaccgcacaaatttatctatcagcgagtgtacatctattttggcggatttgctgagtcaagcttctacaagcgtagcccaggctttagagatgatgaatgttgatgaagagtttaataacggtcattctctaaaggaagtttcccagcctcagactgatttagaaacattagaaaatatagttccttttgagaaggaagtttattattacctaactgagcataaaagtgaaggaataaatggattgcaaaaagctttgaatctagacaagaatgtaatattcaatgctcttcattctttaaagcaaaagtctttggttaacaaagttaatggtctttatactattcaagagttgaatcactcgtgacttctaccccaatattgccaacacgtcaaacaaacccaagtcgaactattaccacatctacccaaggttcgactttggcggacattctcgaaagagttttagataaaggtattgtcattgccggtgatatatctgtatctattgcttctaccgaacttctacatattcgtattcgcttgttaatttcctccgttgataaagctaaagagatgggtatcaattggtgggaaaatgacccttatctcagcactaaggcgcaaagtctggttgacgaaaaccaacgactccaacagcgcctagaaagcttagaagcccaaatgaacgtaatgaaatcagcaatagaagaagggcaactaaccttagctaatacggaagctagttttgaggaagagaaccaagaagtgatcccattatccatagatagcaacatacaagaagaagaggaatctgtcatagaagaggagcaatttactttagctaatacggaaaatatttctggggaaatagaccaagaaagtataccattgttatccatagatccccccgttgatgtctaattgcaatttaggagttatccaaatttagattaatcaaaactggaactcctgaaattttaatcattgtgaaaaaaaacttagtggaaaaaacttaaagttttagatgacatcatggacatggttgacactccaattaataattctcaagatttactaactactggttctaaatccaagaatgaagcgggtttagctcctttattgttgacgttactagaattggtgcgtcaactgatggaagctcaagtaattcggcggatggaacaagaatgcttgagcgaattagagttggagcgagcagcagaaagtttacaaaagttggaagagcaaattttacatttgtgtgaaatatttgaaattaatccagaggagttaaatgtaaatttaggagattttggtactcttttgcctcatccaggctcttattatccaggagaacctagcaacaatccttctatattggaattactggatcgcctgttaaatacgggaattgttgtagagggtgaaatagatataggtatagctcagttggatctgattcatgctaaattgcagttagttctgacctctaaaccaattggatcaattaaaccagaagcgacatatcctgcgtaaaataaagtttaagtttaaatacattttaattaatttgcagattatgaattttggtctttatttgtacggtattttccctgaatcaatttctaattctctcgaacttaaaggattagatggacaaactgttctgagtcaagtaattgatggatttacttttttatactcagaagcttgtcaagaaaaatatttagcttctcgccgaaatttattggctcatgaaagagttttagaagaagcaatgaaggcgggatttcatacgcttctacctttgcgctttggattagttgttaaagattgggaagaaattaatagacaactgatccaactatataagcagcagttagaagaattatttaacaagttagcaggacaaagaggagtaagtattaagattctttggaatactaagtctgaagtccaagcaatgatggaatctaatccagatttaaaacagcagcgggacaagatggagggtaaaaacttaagcatggaagagattattggtattgggcagttaattgaaagtaatttgcaggctcgtaaagaagctgtaattcaagctttctcggaggaattaaatcctttagcaacagaggtgattgaaagtgaaccgatgaatgaagaaatgatatacaatgccgcatttctcattccttgggaaagcgaatctgtatttagcgagcgcgtggagactattgatcagaaatttggcgatcgcctacgtattcgttacaataattttactgcgccctacacattcgcgcagcttgtttctgagtagtctacctaatttcttgcagccccaaactgtgatgttaacaagttggtttttgctgaaaataacttaaaaactcaataggatttatcaatatgttaatgaaaattttactagctccgataactggaccaattggtggagttgtctggattgcagagaaaatccaagagcgtacaaatacagagtttgatgctcaagaaaatttgcataaacgattattaagtttacagcttgccttcgatctcggtgaacttggtgaagaagaatttgaggctcaagaagaggaaattcttttaaaaattcaagcattggaagaggaagccaacagagatgctgaagctgaagaattacagcttgtctaaattatcagtacaatcctggcggtgtctagattgcatagattattgtttacctgctataatctctgaaatctggaaaccatttactggtaatgacaacgtctgcacacaaagtagtgcttcctagcaaaaacttatctggtaattatcttgaggataagagtagaaaacccgctcatgcgggttaaagtttaaacaaaaattaatattcaatctcaaaagtgtggtaattatgcggttcactagtttcctttttctgagatatattttgaacagttgttgagtgaggttgacgtaatctatgaatggttttttccgtttcttcgatctgatgatttagaacgtctaacctttgttggagtacaaacattctttctttaattccatataactctcgttggatacgttgcttttcagtcaccattttataaagctctaattgacttgaagcatctgatttatttctaggcatcgtactaactttagccctaatcaaaccgcggttgcgaatatttttcatgaaaagtacctaaatattttcaacattataactagttttattcaattgtaaacgcctaaatactcaaataatagattttttttataaattcagaaaatatcaagttgtagttttaatgattataaaaaatttgtcagtcattggttgtatgtctctatggaaaaaagatggaattagaaaacttctacacttatgcttttttagaaactcctagctttcccctaaccttgccccaaggaattgctagtcaagtagttttgattaatggtactcaactttctgctattgtcgagcctggaatatctttagaatcgtgccaaaaaaatgatgcagaaattatccagatggctttatgtcatgatcgagttatttgtgaaatttttgagcaaattacaattttaccattaagatttggcacttgttttaagtctcaaacaaaactacttgactatctagaattgcatagccaagaatatcgcaaacagctagaaaaaatcaaaggtaaagtcgaattttgtttaaaactaattcctcattccttacctgaaacagaaacatttacggaaaaggggaggaattactttttagctaaaaagcaacaatatcaaaatagacaaaactttactattgctcaagatacagaaaaacaaaacttaattgatgtcatcagaaatgtacatcaattgccaatagttattcaagacaagcaagaagaagtaagaatttacattttggttggctctcaagataaaattttaattttagaacaatttttaagttggcaaaaagcttgcccacgctgggatttatctttgggagatgttcttccaccttaccattttatttaatgcttattaactattatttgattgattttgaaaattatgaaccagtacgattcacttaatttacttctgtttagcggcaaaggcggagtcggtaaaaccaccatgtcttgctgttttgctcgttattgggcgacaaagttcccggaagaaaaaatcttattattgtccacagatccggcacattctttaggagatgtattacttgcaaaagtgacagatgatgctgcaccaatagcagatttacccaatttgagtattcaggctttagatgctcaaaaactgctattagaatttagggcaaaatatagtcaatttttagaactattagtggaaagaggaagtttagctgatggagaagatttagccccagtttgggatttaaactggcctggcttaaacgaactgatgggattactagaaatacaaaggttactatcagacaaaagcgttgatcgcatagtagttgatatggcaccttctggacataccttgaatttattgcgcttaaaggattttctagatgtaattttaaattcattagaattattccaaaagaagcatcaagtgatcacagaaactttcacaggtagttatacccgtgatgaagttgacaactttttagctgatctcaaatttcaattatcagaaggtagaagactactacaagataatcactttacaggttgtttagtaattgccattgctgaaccgatgtgtttggcagaaacagagagatttttagaacagttaaaaaccttagatgttccctactcaggaatattaatcaatcgcattttgacagatgccaatatagatccagatcgttatgcagagcaggaaaaatacctacaaaagttcttaaatatttcccaaaatcaaccagtttttattgtcccacaacagccatcagccccgttaggtaatttagaattagatcatctagccgcacaaattcaaaaaattgagcaagttgaactggtatctgctccagtcattacatggccagtgagaataccacccagctttagtgattttttagcagcaggatgtcaactaattattgtcggcggcaaaggcggagtcggtaaaactacagtatcagcagcaatgggttgggcttttgccaatcattatcctgagcaaaaaattcgtgttatttccatagatcctgctcattctttgggagatgcatttggagaaaaattagggcatcaggccaaattattagctcctaatttaagcggacaagaaattgatgctgacaaaatattagatcagtttcgtactgattatctttgggaattggcggatatgattagtggtgaaggaacagcaacagacacaaatgtcaatatggcttatctgccagaggcttggagacaaatcatgtctcaagctttaccaggaattgatgaaatgctatccctaattaccattataaatttattagaaagtaaccagcaagatttgattattttagatactgctcctacaggtcatctgctacaattcttagcaatgccctcagctttaggagattggttatcttggatatttaagctatggatgaaatatcaagacgttttgggtcgagttgatttcattggacggctacgtaatctgcgccaacaagttatccaagctcaaaagaaattgaaagaccccaaacacacccaatttataggagtaattcaggcagaggaagcaattatagctgaacatatccgcttaacagaatctctgaaaaaaatgggaattcaacaacgctatgtggtgcaaaatcgctacaatcaaaattcagaaatcaatcagggcttattttcagaacaaacgattattcgcttgcctcaattacccaggtcggtagaaccaatagaccgaattaaaggcgcggctgatcttttatttgcatttgaggaactaacctccaattaaagaacaatttagccgcaacaatatttttgtaagttcattttagaaagggatgtcatgagtgatttatttaaaggatttgagcagttcatagaattggtcgagacgttacaagaaaaaattgacagtggagaagtgaaaactgatgtgcagtttaacacaagatccgtcagtagtattcccagaacaggcaatattccccgtgggagtagtagcaatatagggactagtcggatccgcactccttcctctccttctgcttccccttctccttcctctccagccgctaatgcaggttcatcagagccgatcataccaccggattctaattcgggtatgaccctcaaagatatcggcggactgagtgaagttctcaaagaactcaaagaactaattgctgttcccttaaaacgccctgatttgctggttaaattgggactagaacccacacatggcgtactgttggtaggacctccgggtactggtaaaactctgacagccagggccttggctgaggaattaggagttaactatattgccctagtcggaccagaagtaatcagcaaatattacggagaagcagaacaaagactgcgaggtatctttgaaaaagcagccaaaaatgctccctgtattatttttattgatgaaattgatagcctcgccccagatcgcagtgcagtggaaggggaagtagaaaaacgtttagttgctcagttattaagcttgatggatggttttacccaaactcaaggggtgattgttttagcagctactaaccgccctgaccatcttgatccagccctacgtcgtccaggaagatttgaccgggaaattcagtttcgcattccagacaacaacggacgcaaagaaatattacaagttctgactcgtaatatgcctgtggatgatacggtcaatttggaatttatcagcgatcgcactgtgggatttgtaggtgctgacttaaaagccgtatgtcaaaaagcagcttacatcgccttacgccgtcaagttccttcgattgatgtgcaagctcctgacactatgacggtgaatcaatcggattttatacaagcactcaaagaaatcaaaccagcagtgcttcgtagcatggaagttgaagtcccccatgtggaatgggaagatattggtggtttggagacaattaagcgaaccctacaggaatctgtcgaaggagctttactgtatccagaactttaccgccaaaccaaggccgtagcacccaggggcatcttgctttggggtcctccgggaactggtaaaactttattagctaaggccgtagcttcccaagccagagctaattttattggtgtcaatggtccagagttacttactcgttgggtgggagctagtgaacaagctgtgcgagaattatttgctaaagccaggcaagctgatccctgtgtcatatttattgatgaaattgataccttagctccagcacggggaacttacactggtgattcgggagttagtaaccgcgtagtcgggcaattactcactgaattggatggtttagagacgggaactaatattttagtcattggggctactaatcgtcctgatgcccttgatcctgctttattacgggcaggaagattagacttgcaattcaaggtcgatttacctgatttagccagccgtctagaaattttgcgagtctacactgagggcagacctttgttagatgtggatttggcatattgggctgagtccaccgaaggctggaacggagcagatttagttttgctgtgtaatcaggctgctgtgaaagcaattcgccgttttcgagaccaaggggaaacagacccggctgctattaggattactcttgatgatttccagtattcttatcaaattctaatggagcagcgaaccgttagctagaggcaaatcggggcaaccacgggggattgcccctactttttttgttaacctccgggagtcagaagtaaggtgtgtttatgttcctggacgtgagcgaatatgatcaggtatatggtagcgatcgcctaatatctccaacaatggaccattaacatcaaatttcaccttactgactgaggctactaaaatattgactcgatagcgataacatcccaaatcaattcctagtaagctacaaagtataatccgaattgtggctttatgggaaactactaaaacattaccttctgggtgtttctctataatttcagtaatcacaggtattgcccggttagcaatttctacggctgtttctcctcctagaggtgcattccaagcaggttctgacaaccatttgatatagttttctgtgtagttctcttgtacaaaggatttacttttggtttcccacacaccataactaccttctctgagtccttctgctatataaaacctagacaaaactagactttactttctacttcaacgggagcatgggagcagttatccctcagtagactttcacgccttagccagacgcgattgtgttccaattaagtttctgaaaaagactaccaccatcattgcttggttttcgcgtcggcaatagtctcaattcaatacttgatatcaccgtattatatatcaagtagttgattttttcctaaaaatatattgatttttgtcaatacaagtatagttttgtctatgaaattgtcaacttaggacttgctcttacctgcatatctattcccagagcatcacaaaatggcttggcagtggcaatggtgcgtttcatgggactaacataaaccccttcccattgcaattgtttataaacatcggcaaaactttctgccatctgtattcctgcggttgtcaattctgcatcggtttcaccacagaaattgccattttgactaaatgttgtttccccatgtcgcagtaaatataaattgagtgccataggtttgattgcaattggtaatcaggtttatagtcagcgaagtcgaactgaatttgtgcaaaaataaattaccatcaatcttgcaattgaatatgtgacaccagcacaaagtgattagttaggggttgctgaataaacctaaaaccttgatatatcaaaggttagaggctgataaacacagaaattagtgcaagggttttgaagggtataccggaaaaagtgtgcatttttggggatttcaagagatggcaaagaaattttcaaatctcctcctgactc

SEQ ID NO: 47 - DNA, 41389 bp, Sphaerospermopsis sp. LEGE 00249
  LEGE00249_62
agctattttaggtaattggtaattggtaattggtaattggtaatttttaaagacgctttcctagcaactatcaactgtccccagtcaccagtcaccagtccccagtcaccagtcaccagtccccatcaagtgctttgagttgcaagggtagaacgcggattggtaaatctctctttcgttaacttaggttgtgcaggtggaacagtagcgtttaaaatttccatgttaaatctgtagccaacgttacgaatggtttggattaaactgggttgacgcggatcaagttccacctttttccgcaatgataaaacgtgagtatcaatagtccggggattatcaatagcatctggccaagcacgacgcagtaactctgacctactcaaaggtactccacccgcctgggctaaaacataaagtaaactaaattcctggggtgttaaatcaataaattccccttgaaaacggactcggcgctgtactaaatcaatttgtaaactgccataatccaaataagctggtgcagttggtatgcgtttacggcgaattagtgcttctacccgcgccaaaaattcctgcattccaaaaggtttgcttaaataatcatctgctcccgcttttaaaccggcgacaatatccgcttcattattgcgagcagataacatgagaattaaaggctgatcctgacgatttaaccaatggcaaaattcgataccgtcaccatctgataagtccgcatcgagaataaccagggttggctgatggcttaaaaacacttcccttgcttgataaatactggcggcttgatgtactctgtattccagttgttgcaagtgccaacctagcaacgacctcagatggggattcccctcaacaatttcaatacaaaccgatcccacagttgcaagaccccttagcgtcgatgattttcaaattaacaatctcaggctcaaggttttgtagtttttgttacttcagttgatattatctttacatttgctcaaagaaaaccttgcaagaaatttagataaatttaattttggacgtggttataaagattctgtttgtgcttatgtctgagaattaaccaaaatttcctttgcttgaccatccaacttaaaaagtatagtaaactggaaaaacaaacctgcaaaatctatctattgagtgagaggctaagttacaaggacaattttagataacaatcctacaatcaaattttgtaaataggatttgttcatgcttacagctttggggggtctgacccaacgtctaaatattaactttgggttaatactaaagaaggaagtcatacttctctttcaagcgtgaatcatatacaattctcattttttagagattaacacagcagttatgctccaagacacacaaaccattcgctattaccaaaaactgactgacgccttcgtcgagttatggaatcgcggttatcgtatggatgatatgcggatgtatttggatggatttttagccgcactgcgacaaagtaacgctatagaaccctatctgatccaccgtttagaggaagaagcaaaccgttacttatacgatggctcaaactttgcaatggtgcaaccagaaccagagcggcagcacggatattactaaaccaccctagagggtttttagttacttacctccattatcgtcgctgatcatagcataatttttgccttggtcaactgtatccgatggtatgatatttgttgtaaataatttattgactgtattgaaaaagtttatccccttggcattatgcggctaaggggatttttggtaagaggcagggggtaggggatcagaggggtaggtttttaatattatctgttgaggcaggatctggaagacaaggagggaaagtagacaaggaagattttatgcgagttaatttttataatttttttgtcagaaaattaaacaatcataattctgaacttctgaactccttaaaaaaatgggcaatgagttaatcacccatcacccattaatcaaactacaatttctctgctgcctcagtaacaattacgcttgcttgtgtattcgcaacttttgctgcttgcaaaatcggagtattcgcaacagaattattagctaaagtaaacaaaggatttgacaaaataccggatatagttgtagcaattaaagttgctatcaacccaacttgtaaaggtctaaaaccaggtaaattccaacgtacttgaggataattcttcactacgtcagacatttcttgtggttctttgactaccatcattttcactacacgaatgtagtaataaatggaaacaacgctagtcactaaacctagcaatactaaccaataaaggccagcttgccaacctgcccaaaataggtaaatcttcccgaaaaaccctgctaatgggggaataccacccaaggataagagagaaatacttaaacctagtgtaagcagtgggtctttttgatacaaacctgaatattcggtaatttgatctgtacctgtccgcagggagaagagaataacgcagataaaaccgcacaggttcataaacaggtaaactagcaagtaaaaaatcatgctggaataacctgcatctgtaccagcgattaagccaatcatcacaaagccagcttgggcaatggatgaataagctaacatccgtttcatgctggtttgagccagggcaaccacgttacccaaaatcatactcaagactgccagggcggtgaaaacaaatctccactcgtctgcaacgacggggaaaactacggttaacaagcggatagctaaagcaaaaccggctgctttagaaccgacggatagaaaagcgattactggggtgggagcgccttcataaacgtctggtgtccactggtggaagggtgcagcggagattttaaaacccacaccagcaataacgaaaacaagagcaatgactaaccctagagattgacctacatttgctgtagcgataccgttagcgatcgcactcagttccgtttgtccaccggataaaccatacaacaatgatacaccgtataaaaatacggctgtgctggaagctccaattaacaagtatttcagcgccgcttcattagaacgggggtcacgcttggtataacctgttaacaaataagaggaaatactcagggtttctagggagatgaaaatcatcaccaactcactagcaccggagacaaacattcctcccaaggtagctgttaataaaatagcgataaattcggctagagcagtaccactttgctctacatagcgaatagacatcaagacggtgacagcggcagatagagcaatgataccgcgaaagacaatactcaaatcatcagcgttaaagccaccagtaaaaccgataggattggtagaatcccattgaaagtatagggcgacaatcgcggcgaataaaccagcgatcgccagatatccgatccagcgagaagatgtgcgccccaaaatcaaatccacaatcaaaacccccaagagggtgagaatcacaattccctctggtagaatagttcccgcattcaactgggatgcaatattagcaaaatccatgagatgtataggttttggtgattagagattaaggctaactgagttcattctatctatagttcttcaccaaaattgcatttatcaattgataattgacaattgacaattgacaattgttttattccaggtttaaaacctctccccttacccggtaaaaaaaagaaaaaaatgtcagtcctaaccaataaaaacaaacagtccagtaatctactgaactgccaaaattgtgataaatatataacagttaacagttaacggttaacagttaactgttaatagccaccgctatttttgccccaattaccaccactacgaccacctttctcctcttttggtcgagccttattaactttcattacacgccccatccattcagcaccgtctaaagcttgaatagctgcttcttcctcggcagcggtttccatttctacaaaaccaaagcctcgtacacggtcagtttcccgatctgtgggtaactgaactcgtttaacagtaccgtagtcagcaaatactttactcaggtcttcttgtgtgaccttgtaggataggttccctacgtagattgacatgaaactctccagaatccattgatgcagagatgtctatccgccgagccgcttgaacttgaaattattgctaaccgcaagcaccgtatcgtcgaatttatttctctaattctcccctatgctaacatatttgccagataggcaaggcttaatctggttattatggttatttatgatgaaatatggtaaatatcacaagcacttatgataatcaataaagtttgtaacagactggggtgaattgatggtactgattcgccaattatgcctcagataagttaaagatggaaataccaggtaattgatttttggcagttgcttgtttaaatctccaaagcagcactgcacctgaagttgagagcaattttccccttttggggcaatttgtgtcaggataaaatcactgcttaggcgtgatatttgatcttgacatctcgccaaaattatctcaacttgactgtttagcttcacagctattctttttttttgaaatttccatgtcaactctcgtcatcgtcgaatctccaaccaaagctcgcaccattcgcaactacctgccaaaagactatcaggtagaagcttcaatgggtcacgtccgtgacctaccccagtcagctagtgaaattcctgctgctgtcaaaggggaaaaatgggcgcagcttggggtaaatatagaagccgactttgaaccggtgtatgttgtccccaaagataaaaagaaagttgtcacccagttaaaagatgccctaaaaaatgccgatgaattaatattggcaactgacgaagaccgggaaggcgaaagcatcagttggcacttataccaattgctgaaacccaaagtgccgacaaagcgcatggtgtttcatgaaattacccaggacgcgattaaaaaagctttaaaacaatgccgcgaaattgatgaacaagtagttcgcgcccaagaaaccagacgcattttagatcgactggtcggatataccctatcacctttgctgtggaaaaaaatcgcctggggactttctgcgggtcgagtgcagtctgtggcggtgcggttgttggtaaataaggaacgtcaacgccgagcttttcatgaaggtacatattgggatttaaaagccagtctcttatatgaaaaaacatcatttagcgcccaattaattaccctgggaggcacgaaaattgccacaggtagcgattttgaccccgcaaccggacaaatagctgctggacgcaatgtggtgctattaaatgaggaacaagctttagcacttcaggagcgttggcagggcaaaacctggactgtggccgatatggaagaacgtccagtcactcgtaaacccgcaccaccctttaccacttcgacactgcaacaagaatctaaccgtaaactgcgtctttccgcacgggatacaatgcgaattgctcaaaatttgtacgagcaagggtatattacctatatgcggactgattcggtgcatttgtcagatcaggcgatcgccgctgctcgcagttgtgtagaacaaaagtacggtaaggaatatctcagcccccaaccccgacaatacactaccaaatctaaaggcgcacaagaagcacacgaagccatccgccctgctggtagcactttccgcactccccaagaaactggtttaagcggacgagaatttgcagtttatgatttaatttggaagcgtaccgttgcttcacaaatggctgactctcgccaaactcaaattactgtacaattgcaagttgaagatgcgggttttcgttcctctggtaagcggatagattttcctggttatctccgcgcctacgtcgaagggtccgatgatccagaagcagcattagaagaccaagaggtaattttaccagccctgaaagttggcgatcatcctacctgtgcagaactagaagcaataggacatgaaacccaaccccccgctagatatactgaagcaagtttggtaaaaaccttggaaagtgaaggtattggtcgtcctagtacctacgccagcattattggtacaatcatcgacaaaggttatgctcagttggtgaataatgctttaattcctacttttacagcctttgctgtcaccgacttactagaaaaacacttccccgatattgttgacccaggcttcacctcgaaaatggagcaaaccctggatgatattgctacaggtgaagctcaatggctaccctatctccagaaattttatctcggagaacaaggtttagaaaccttggtgaaagaacaggaaaatcaaattgatcccactaaagctaaaactgtagaattagaaaacttagatgcaaaagtccgcattggtaaatttggtccttacattgaagtagataatggtgatggagtggtgacagcttccattcctaaagacctcacacccgctgatttagatcccaaacaggtagaagtcctgctcagacaaaaaacagtaggacctgatcaagtgggaagacatcccgaaacaggtgaaccaatttatgtgaagattggcacctatggaccttatttacagttgggtgacaaaaccgaggaaaaccccaaacctaaacaagcttcccttcccaaaggagtcacaccagaaaatctgactttagagatggctgtgggtgtgttggcactcccccgactcttgggcgaacatccacaaacaggggcaaaaattaaagctagtttaggaagatttggaccttatgtagttcatgatcagggtaaagaaggtaaagattaccgttctttaaaagcaactgatgatgtattgacaatttccctggaacgtgcattagagttattcgcagaaccaaaaaaggggcgcagttctagcagcagtaaatctaaagccgctttaagagaattggggatacatcccgatgatgatgcacctgtaaatatttacgaaggtccctatggtcattatattaagcacggcaaaactaatgtaggtctaccggaaggtaagacagtagaaaatattaccctgtcagaagcattagaattgttgcaagctaaagcatctactaaatctacacgcaaaaccactagcaaaaccagtaaaacaactactgctaaaactaaatcaactaccactaaatcatctaccagtagcagcaagaaaaaacaagcatcaaattagagactaaagggatgggaaattacgaaattttacctcttacccattccctgatcattgtgataatctaataagtaaggaaggacacaaaaccaaattttcacttggtttaagtctggaaacacaggaatctatcaacttgataagaaacgaaaaaagctacaaatagccagtttctatgattctgttagttaaatttgaggtagtatctcaggagcgttcagttaaatggactatatagacaaggtactggaaaagctgaaagaattagcgcggaagctagttgaagcgttactgggtcccgaagctgaacccgaaccggaactaattccgattcctgtgaatgaacgctcccgtcgtcgctaatgacctgaagatattggagtgaactttgctgcctttaagtattttagtgctgcacggtccaaacctcaacttgttaggacagcgagagccggatatttacggttctctcaccctagaggaaattaaccgcctgttagcagcagaagctataaaattagaggcgaaagttgcgcctttgcagtccaatcatgaaggtgttttgctagatgccattcacggagcattaggacaacaccagggaattgtgattaatgccggggcatatacccatacgagtgtagctttacgagatgcgatcgctgctgtaaatttacccacagtagaggtacatctaagcaacatttaccgccgagaggattttcgtcatcattcttatattgccccagtggtaataggccaaattagtggctttggtgtccaaagttatttgttgggtttacaggcattggtgaatcatttaagactcaaaaattaacaggagtcagcagcggaatttctgtttttatcttcccaatcaccaatcaccagtcaccagtcaccaattatgcgttattctctcgtcaatcgggttagaggtattttcctgggagcattgttaggagaaattttagctactcagaatgttagtgatttaggggaaattgcggttctgggtagtaaaagtttaattaaattaggtaaattagatgcagaagactggttaaagtgttacaaacaagcatccttggatgtagaaaatactgatgatgcttggggaaaaataattttagccaccttgccagtagcaattttttttcacgaagatactgttaaacttaaatataacctgctgcaattattacaaatttgggatgccaacccagtagtgagagatgcagctttagttttaggatatgcgatcgccaaatctctgacagaaaaacttgatcctgtcacactcattcccgaaacgatggattttttgggagaaagcaaaacattattactacaaaatttattaaaagtcaatactttattagagcaaggagcaggattagcacaagcgcaaactgaatttagtaagcaagacaaactcagtaacaatattgccttagccttttactgctttttaagtaccttagaagatttccgattgacagttttgcgagctaagagcaatttaagagagcaaaactcttggtgttgtgctttggcaggagctttatcaggggcatataacagtacagaagggattcctgtgaattggcaagtcctattatccaactttaatcagccaatatggggaatgagtagctgttatgtgatgttagaattagctgatactcttgtagcagtctggtcaggtgtgtataatattagtccaaatatccaggagttgacaaaagaaggatgtcagataaattgggaattggcttcactttccgtttttgcagcacctggtgtaattcgcccgcgttgaaaaatcaaaagtaaaaggtattgggttttatttgtcaaaaaatcactcacaatgaaaacgcagcgatttttgcagtccttggccaagcaattgagacaatggcggcgacagtacaaagtgttatgccggaaaagaaagtggcttggttcggtgagcagttcccaaaatcaaagccgtcatcaaaaacttttcaggactattatcaaaaatctactgctgtatttattacctaccagtgaagaaggtggacatctacaaggtagaaaagctcctcaatcaacaccaaaatcctggaaacgtaatcatggtatttatgccgttgttttcaactgggtacaccaacagcgttatacggtgattttattcattgctgtggtatctttaacaggtgttataggtcatgaattatacaaccagccccagatgaaaatcgggacttttgccccacaaacatttattgctccctattctgccagtattgaagaccgagaacaaacagaagcagaacgcaaagcagcacaggaaaaatctcaccctgtgttgatgatcaatacccagaaaaatgagcaaattaaagaaaatttgcgccaactgctggaagatggcgatgaaattcgtgatatcactgaaccttttccttttttcgatgtttctatcttgcctattcccacccagcaatatcttcgttcttgtttagaatcggaatgggaacagctaaaacaagctttagaaaagcatcaaaaagaaaataagtcaatgcctaagttcaggacagcagacagacatcaattttctcggtctgtgcctagtcctggatcaacattatcaacaaatgcaactactaaggaaagcaaaactagcaaaaataattttgaccagacactagcagaactaaaagcttacagtgtcactaactcagaaaaaaatctgtctttactgtttgcccaaatatctcaagtgagagaaaaatatggtcaagctattgccaaactgttacagatggaggcggaacgaaaaaaaccagtatatgggcaaactgggtttttggatctgtcagatgacgactggaaaatagcaaaaacgggaatcggacaaagtgcagaaaggatacttgctcaaggcatagctccaggattaccccctagtatcttacaggatgcagtgagtctacaagtacaaatttctgtaccaggtgaaggagaatccttagccactaaagtattgttggttgtattacgaccaaatctgcaaacagatgcagaaaaaacccaacaacaggcaaaactggccgcagagcaagttccatctgtgatcaaaaaggtgagacgaggagaagtgattgtcaagaaaggtgaaaagattacacaatggacatttgatgtcctggattattatcacctgaatcgccgagaggtgaattggctgggtttgatgggtttagccagtttggtgagtgcggctataggtgtttttgtttgggctgaaaggcgggttggtagtcatttgcgagccagcgatcgcctgttgatattattactcactttgagtattcctagtgtcttggcaattggtataccctatgctacctggatcgccattggtttattgttaggaagcttttacggcgctgctttgggagtgacagttgtgggcttattgtcgctaatattaccaatcagcatagaaattagtaagattggtctggtagctggtgcttctggcggaattttaagtagttatttagctcaaaggttcaaatcccgcgaagaattggcattattaggtattgttattgctttaactcaaggtagtatttatttaatcctgaatttactggctggtgctgcattcgtttctgcttggtatacggttctgcaagatgcgctgttattcggtttatctggtttggcttggagtattatcgccttgggtttaagtccgtatttagaaaagttgtttgatttaattacacccatccgcttggcagaactagctaaccctaaccgtcttttgttaaagcgcctggctacggaaactccgggaactttccaacatactttatttgtggccactttggcggaaactgccgcaaaaaaactacgctgtaatgttgaattggttagggctggtacattataccatgatattggcaaaatgcacgaccctttaggatttattgaaaatcaaatgggtggaccaaataaacatgaaacagaaattaaagatccttggaaaagtgcagcaattattaaaaagcacgtaactgagggtttaatgatggcgaaaaagcatagtttaccgactgcaattcaagcttttattcctgaacatcaaggaacaatggcgatcgcctatttttatcaccaagcccaacaaattgctaaagataaccctagtattatagtagataaagctgatttttgctatgatggaccaattcctcaatctagagaaacaggaattgtcatgttagcggattcctgtgaagcagcgttgcgaagtttgaaagatgccacagcagaacaagcattaaatatgttgaataatattattcgtggtaaatggcaagaagggcaattagtagattctggtttgactagagaggaaatgtcaaagattgctttaatctttgtggaagtttggcaacaatttcatcataaacggattgcatatcctaagtcaaaagctagtaatgataattgataattgataattgataattgataattggtaataaaaatctatcaaaagaaagacataaaaaataaaaaaaaacagataatttcttatcaaaagaaagatgcagaaataatgcgtcagaggttgaaataaagatatagccgttgacaggatggttaggacatcaattgataatgataataatgaaactcccactacaagatgacaaccacagggggtttccccctactgactgactcctgctatacattctcaaaacctacttattgacgtggaatgaataataatatggcatttttatctattgatgaactcaaaatattagtagaaaatccccaatctccatctgtatctatatatatgcctacgcaaaaagcaggggcagaaattcgccaaaatcctattcgcttcagaaatttaatgcggtcagcagaagaacgtttagaagcaatgggtatcagacataccgaagttcttgattttctgcaacctgctagagaattagataggggtgatttttgggaacaccaaaatcaaggattagtaatttttatttcccaaaatttcttgcgctactattgtttaccaattgaatttccggaattagttgtagttgatgaacaatttcacctcaagccattactgcattttattaacaatgatggaaaattttatgttttggctttgagtcaaaaagatgtaaaattgtttgcaggtacagggcatagtttgaaagaagtggaagtagaaaatatgccacatcgtctagaagaaactcttctagaagacgagttacaaaaaggtgttcagcacagaattggtacacccagaggaagaacctctgctgctcaacatccaggttcatttcatggacaaggtagccctgatcgagagaaacatgaagatgatattttacaatttttttacgctgttgatgaagcattacatgaaaaattaagggatgaaaaagcgcccttagtgttagcaggagtagaatatttattcccgatttaccaagcggcaaatacctatccctatttcctagacgaaagcattaatggcaatccagaacttctcaatttacaacaattacatgatgaagcttggcgaattgttgcaccttcatttcaacaaaataaaaaagcagcaatagaactttatgaacaattagctggtgaagaaacaggaaaagctgttagtgatattaaagaaattattccggcggctttttatcaccgagttgattctttattagtatctatagatgagcagaaatggggaaaatttgaccctgaaaatacgactgtggatttgcacaccgaaccagaaccagatgatcaagatatgttagattttgcggctgtgcatacactattaaatggtggcaaagtttatactcttgaatcagaagaaatgccaaatggggcaaaagtggcggcaattttgagatattaaagtgtaagcattcagccgtcagcaagaaagaagaaaaccatcaaaaaccatcaattgtccattgataaattgccgtcattaacactggtgtaatttgacaaaaataatacccaatacttagatccccgacttctttaagaagtcagggatctatattgtttatcggtacaaatacaggtaatctaagaaaggttgaatttaccttaatagctatcctatgacagcaaaatctcctcgcacgggcaaaataaccgcagccacacataaaactctctgaaactctctttccttcgtgtactttgcgttctttgcggttcaatcatagagcaatttccggtgtaatgaggtagactatgggcagactgccacaaaagttttattatgatgatttgtacctcataacaatgaaatctgctgtatcaagcaataggataattttctattttgatataaaaatcaacttacacattttggataatcccgataattaccatgataaacgaatattcaattagtgaacttgtcaaacaacaacgtacctattttgctacaaatcaaactcaagaaattgattttcgtcagcaacaacttgtcgtcctgaaacaattaataattaatcatgaaccagaaattattcaagcattacaagcagatttacataaaccagaattagaagctattacttcagaaattattttaacaactaaagaaattgaatttgctatcaagaacttaaaaaaatggactaaacccaaaaaagtaggagttccttggcaactattaccagcttcagccaaaattcaaccagaacccctgggaatagtgttaattattggtgcttggaattatccatttcagttagtaattgtaccgttaattggtgcgatcgcagcgggaaattgtgccattctcaaaccttcagaaattgccacccatacctctaaactcatagctgaactgattcctaaatattttcctgaagaatatattgctgtagtggaaggaggtatagaaaccagtcaaaaactactcacagaaaaattcgatcatatcttttttacaggtagcactcatgtaggtaaaatcatcatggctgctgctgccaaaaatctcacacccgtaacattagaattaggtggaaaaaacccctgcattgttgatgttgatattcatttagaacatacagctagaagaattatttggggtaaatttatcaatgctggacaaacttgtattgctccaaattatatcttagtcgataaaagaatcaaagataaattattagttaatttagaaaaatgcctcaaagaattttatggtgagcatccagaaaccagcccagattatgccaggataattaatcaaaacaactttgatagattggttaatttattgcaagatggtgaaattatcattggtggaaaaaccaaagcaagtgaattatatattgctcccacaattattaataatgtttcctttacagatccgatcatgcaggaagaaatttttggtcccatcctgccaataattgaatatacagatattgaagaagctatcactgggattaattctcaaccaaaacccttaactttatacttattttctcaaaacaaaaatctacaacagaaaattttacaaacaacatcctctggtgcagtttgtcttaatgaaacagtcattcattttactgtcccatccttaccatttggtggtgtaggtaatagtgggattggtagttatcatggtaaagctagttttgatactttttcccattacaaaagtgttcttaaaaatcccttttggttagacataaaattaagatatcctccctacaaaggcaaattgtcaatattaaagcaacttcttaaattctgaactatagcaggagtcagaagaattttagattttagattttagattggattcatgaaatacaatccaaaatccaaaatccaaaatccaaaattgtatccccagtcaccagtcacccctaattactatacctttcttgcgcccaaggttcaccccgacggtgataaccgttttgttcccaaaaacctaattcttcctgttctaaaaactctaaaccattgatccactttgcacttttccaagcataaagatggggaacaactagccgcatcggtccaccatgttctgcgggtaatggttcatcaaataatttaatagcaaagaaattttcttctctgacaaaatcttgaatactaatatttgtggtgtaaccaccatagcaatgttccataatatgagcagctttgggatctacttccagcaaactcataaaatctgtcactttaatcccagtccatttaacatcaagttttgtccaatgggtgacacaatgaaaatcggctgtaaattcatattggggtaatgctagaaaatctgaccatttaaacacagtcggttttaccaaaccccaaacgcgaaactcccattcctcaatactgacttggggagttgcaccataagttaaaaccggaaaacctttagctaaatgttggccaggaggaacttttgcactttcttctggacttggtttctgaaaaaatttcattagacatctccagaaaagaaattatggaacctatttatgggggcaggtcgaagcatttgagatatttagatgtctgatttttccgttaaattatcgcccaaatgcttcgcccctacaacttatgacaaattaatacattctattttggagagcttgtcctaagttgacaatttactagacaaacctatacaagtacatacaaaactacaagtatttgacgtatacatggaataagttgactaaaaaattaggcaaaatgtgtcagaattaaataataaagtatagtgttgacatcagcaaatgcttttatccatcaaaacacaactcaagttaaataaaactcaagaaatattaatggctaaacacgctggtatagcaaggtttacctataattggggtttagctacttgggcttctttgcataaagatggattaaagccaaacaaatacatcctcaaaaaattctttaataatcatgtaaaacctgaattggcatggattaaagaaaagggtatttgccagaaaatcactcaatacgcctttgatagtttaggtgaggctttccagagattttttaaaggacagtctaaatatcctaacttcaaaaagaaagggaaaaatgatagttttacaattgatgctggtggtaaaccaattcctgtaggtggtatatcaataaaactaccaacaattggatgggtaaaaacttatgaaggattacctcatactacttgcaaaagcattactatttctagaactgccgatagttggtatatagccttttcttatgaacaagaatgtcagccaactattaaaaaacatgatgctgttggtgttgatttgggaataaaggaactagctacactaagcactggtgttactttccctaaccctaaacactataaacagaatttagctaaactgcaaagattatccaaagtctattgcagaaaggcttcatgttcaaataataaacataaagctaaaattaaactagctagacatcacgcaagaatagcaaacctgagaaaagacactcttcataaacttactacttacttatgcaaaaaccacgccaagatagtagtagaagatttaaatgtttcagggatgttgtcaaatcataaattagctcaagcaatagctgattgtggattttatgagtttaagcgtcagctagaatataaagctaaaaaatttgggtgtgatagcctgcgtggcgaagccataattataattgctgatagattttatccatcaagtaaaacctgttctcgttgtgggcataaaaaagaaaatctttctttatccgaaagaatttattactgcgagaactgcggttttgaaatagatagggatctaaacgctgcaattaatttatcgcgtctggctaaggcgtgaaagtctactgagggataactgctcccatgctcccgttgaagtagaaagtaaagtctagttttgtctaggttttatatagcaggttaaccgccgcaactatgactgttatcaagaaggtttagctggtattcctggggtgtccttgtttcctgtgaatcaggctgaaaagcataattatcagtatattgttttggagatagaggaggaacaaagcaaagttagccgagatttgttagttaaaattctccatgctgagaatgtgattgcgaggaggtatttttatcctggttgtcatcgtatggaaccttatagatcgtatttcccccatgggggttgtctataaaatctttaagtcaattatccccaatgaatcgaaaaaagtttttgcttgtgactagtactttgccgggtaattttggtgttggaccaataatattacgtgatcttctcagagaaattaaaaattgtgacttctctattttgggactgatgctgccaaattttagtccagagactaatgaagaaagttttgttgagcaacctgagttaaaaatcttcacctggaaagtgccacgaaatgatttttggcatagatttgtacttatcagagtaattaggaaaatactaaacttcatatctaatattctcgcgacgagacagtgcttagttcaagctaatcactactactcatctcaccaattcaatggagttattgttgttctagatgactacaaaacaatcctgacaggatggagattgagtcgtagatggagagtgcctttatatgtctatatttgggacgatcccgattgtgttttgagttcatcccaggtgaaccagtggttaaagcgctatgctttgtataattttgcagtgactctcaaaatggctggcaaaggagccgttgtctctgaaaatatgcaaaaagattatcatagagtttatggtttagacagcctaattgttcgtcatggaattagtttgaagtattataatcttccagaaaacaggggagttactcaaaagactgctgatggcgaaattgtgattgggtttgctggtactctttacgctatttccgcatgggaagctctcatagaagcattaaatcatcttaactggaaagtggacaatcatgatgtccgaattcgagttttaggatattcattcaagtttacggctacatttcctcaaagaattgagtttttgggctaccatagtcctgaaaatacaatagaaattttgagaaaatcgacgatcaattatctcccatatccctttgagccaagtttatataagttttcgcggtattcctttcccactaaactgagcagttatgttgcttctggtgcgccaattatggttcatgcaccagaatactctgaactcttctcattctcacaaaagaattccatggggattacaacatctagcctagacagttcaattttagcagaattggtctatggatttttaacatccaacactgctgttgcaaaagcccgggaggttgttaatcaagttgccaaagatgaactaagttacaataagtttattgataattttagacaatttctagattaatttattaattaaattaagcgatatttatatgtgtggcatatctggaatcttaacatttaattcaactccagttgaaagaggcgaaattgaactgctcaattctgcacagtcccatagaggtccagatggggaaggaatatttatacttggaaacatagctcttggacaccgccggctctcaattattgaccctaaacatggtactcaacccatgtgcaatgaaaatcgctcagtttggttagtagctaatggtgagatatataacttttatcatttaaaaaaacaacttgaacaatgtggacataaattcaagtcagaatgcgatgtagaagtcattttgcatggttatgaagaatggggaaaatccgtagtagaaaaattacgaggaatgtttgctttcgctatttgggatagctcaacacaagagatttttctggccagagataggctgggtatcaagcccctatgttattctttaagcaagaatagactagtttttgcttcagaactacaagctttaagacaattaaatacttttaattctgaaattgatttagaagcacttgatttatatttacacttgcagtatattccccctcctcaatcaatttataaatcaattaaaaagttgcctccagctcatactttaactgtttctgctaatggggaaatatctgattttcactgctattggcaaatgcaatggcaacctgaccactccaaaactgaggatgaatggattgaaattttggattccgcgttaaatgatgcggttaaatctcatcttgtatctgatgttccctttggtgcatttctttcggggggggttgactctagtactattgttggctacatgagtcgcaacttaaatcaaccagtacgttcattcaccattggatttaacactggtgattgtgatgagcgagagtttgcccgaaaagcagcccacaccattgggtctcaaaactttgagacagtgcttgaactaaatgtactaaacctgttacctcaagtagtgaagcactttggtgaaccctttggagatagctcatcagtttgtgcatggatggtagcgcaaattgcatctgagaaagtccccatgattttatctggtgatggaggagatgaaatatttgctggctactcatatttccccaaactggtggctaattttcctgaattgagtagatttaacagattcaaacgttattttggtaatcaactccgctcttttggctttctaaccccacttccagatttggcaaccgaatggtactcacggtcaccatttttcaatgatgctcgacgtttaagaatatggaagcctgattatcgatatttaatagagtcaactaggaattggaaccaaaccaactttaatcgatcacaaagttccaacactttagatcgagttcaagaaatggatattaatacttacttgactgctgataacttaaccaaagttgatataacaagtatggcacatgggttagaagttcgcgttcccttgctagaccatttgttagttgagacagttaccaaaattccttggtactatcgattgggttggttagccaatactggggatagtgattcaataactaattcatcaattgttgccaagaaaatgacttcctgccctcccaaaaatgcgagttctgcttcctggtgcggcaaatatattctcaagaaagcgtccatgaggttttatgattggaattttttaaataggcccaaaaaaggattttccattcctatagatcaatggtttttagaccgtaacacaagagaaatgttgcgtgaagttctcttgtctcaggaaactgggttgagtgagtggtttaatacacaagaaattgagctactaattaatgaacacggaaccttagagaatcacggtcaccgcttgtggtctttattatttttatctgaatggaaacggtcacattaatcgggggttatcaggacttacgcaaaaaggaacgaaagtaggggtaattcatgaattacccctacgcaagaataaggtttttagtcatatcttgcgtaagtcctagttagggcttgctgaataaactcaaaaccttgataaatcaagggtttcaggtggaaaatcaggaaatcagtgcaggatttttcaggggtatactcctaaaagcgtgcattttccgggtgaaatttcaaagaattggttactaacagatcacccaaactcttgcctattccctattccctattccctgccttaacgaacagaatttttcagcaaaccctagttatgttaaaaggcgttatgttaaaaattgccattattcacgcatccgattttggggggggggctgaacgaagtgttgtttcactccatcgtaacctccagagactaaatcacaaatctcaattatatgtgggttatcagttaacctcagaaccctcgacaattcaaattccctatgtgcgaggtgtatggggagggcgtcgattggctcgctccctggaaaagcattatggttggcaagatatttacaatccgagttttcgtaatttagtgaacttgattgatttagacacagatgttgttcacttcaattctttgtggggatcaggaggctttgctgacttaggagcattgccttctattacccgaaaatggactggtattatcactctgcgagaaaattggttattgacaggacattgtgcttatttttttgaatgcaaccggtggaggataggttgtggaaattgcccagatctttctttgcaaccagcaatacctgttgacggaacaagatttaactggcaacgaaaacaaaggataattaaaaactcaaatgtaaatattgttgttatttcagattggctgaaacggcaagctgaagctagtccgattttaaataataagcccattcatcggatttataatggtattgatctaaaagtctttaaaccagtaactagtgcagaaaaaaccagcttgcgtgaccaattgcaaattccaaattctaaatttgccattttactagctggtcaaacagtagaaggtatcaatcaaggtattgcaacccgatatgcagttgatgctttaaaccaattatcatctgacttagtttttcctgtcgttttaggacgctctgctaatcgggtgttaaacatgattcatcatccaggaattgccgtcccattccaagatgaaccccaaaatatggcacagtatttccaggcatgtgatttaaccttagttacttcggaagtagaggcattcggtagaattgccgctgagtctcaagcctgcggaacaccagtagttagttttgattccggtggattaccggaggtggtgttggataaaattggaggcagaattgtacccagaagcgatgtcaagggattgatacgggcaattgattatttttactccaacccttcagtccgtgatcagtgcagcatacaaggtattgctcacgttagagctaattttgatgaattggatatagcaaaccagtatgcaaatctttatcaacagatcaaaaatggagaatttggatgatggagtcacctacctctaatcttcccagggttgccgtaattatccccgcctttaatgctgctaagtacttgcgtcgcgcagtggaatcagtctggcgcactggttatccatccattgaagttgccattgtcgatgacgggtctactgatgaaacttctaaaattgctgaagagatttgcgctgaagctccaaagcaatgtaccttgtatcggcatccaaacggtggaaaccatggggtgtcggcttcaaggaatctaggtattgctagaacaactggagagtgggttgctttcttagatgccgatgacacttatacaaatacccggtttgactgtttacacgttgacaaaccaaacaatcagacaaatcatttatctaaccatcacctatccaatgtggatggtttttacggagtagccgcaatcgttttagatgaggactcttaccccccagatgagaatttctggcgtcagaataatttgtttggtatttctacacctttatgtggcatccaattattaaaacatctacttactggagttacctggcccataagtgccattactgtgcgtcgtagtcttttggaaaaaactggaggatttgacatcagtaagaatattgcagaagactgtgatttatggttcagagtggtaacagttggtaaaatcatgccagacaatttatctagccctatcagctactatcatcgccattcatccaatacctaccactacaagatagaacaccgtctagccatggtgaatgcgatgttagactcatggcattgggctaagtctattggtgtccacccggactatgttcgagttttttctgattgtgtgcctgattatgcttacaattctattgtggcggcacgagaagcggatcgaccagacgtggcttggtcaattttgggtctcatggcaatgtctaggaaactaggttttttcctaaaaattagaaccctaaaacaatggcgagctttaatcttgagtacccaggtaggtgattttttcgcaagccggaaatgaggctggttttagagaaggaaaataggtaaaactgttactgcataaggcttgctttctagtaattcaagcctaaagtgtacaacaaaatacaagctactgaaagatcgcaagagagctaaagttttgtataaaaatcagtttattgtttctaacaaagaatataggatatcataaaaaaatgaatcgcctacccaagtctttaaaagactacttagagttatctatatttgcaagatactataaaactgctttatctaagtatttttcaaataaagaaatacctaagattgctttcgttaagcaagacgtacaagacgatctttactgttgtgcctctaattcttccgtagcgcaattaattagctctacacttttaagatcaggaccagttgctctattttcaaaatttaatgctgatttttacattgttcacactgagccagaacaagaatgtaatatctggaaagaaaaatgcactattcttgaatggtgccccatagagtatttcgagtactttcgccatcatgttcctggaagaggctatggacaaaagaatttctcaatatcagtttatgatataaaatgggaagactatgatatagtaataagtctggatatatgtattcccactcagttaattaaaaaatatcccgccatagtttggtgctgctatataaaagaaattaaaactccctcttatgcaaaatcactaataaagccgattgcaggatatgatctattcctaaatcattctttttgtttagagttggatcgattaagatatccatcgcatgtcatcgagtttccttatcacttgcaatattttggttgctttcatgaaattttctctttacctgacataggtcaaaagcgctctggtatttttttggatcatcattctgctgttgctttttccgatgaagaattagaaaaactggctcagtttggttccttgtccagcaccgggttgataaaagctcaaaaaatcaattcgatgcacaccattccaaatcgtaccatggataagaaattcttatctaaattagtgcggagtaagttcttcataaagtgtggaggaagaaatgtattagggactgcatctgtagaagctatttctgccggctgtatagcacttagtataaccggacagcatggacaaaattcaatcttcaatgagtatactagtgccacctccttgaatgagcttgtgaaaaaaatcaaggatttagagaataaccctcacttgtatcaacgtgaagttgagcgacaacgaaaattaatcgattatttatgttattatcgcccatcatttcacctctttaagatggcaaaaaaaatcattaagaacagacacggttataattgatattgaccatgtagtgccggcagttacccattaggaaacattatagtccttgcaccacaagtgttgaatgttaatttgggtttcgctgtaacactatcatttatgttagtctaccccaaccacaaaaaccatgaaaatcctacctaacctaaaaaaactaagcactaaatatcgatatctcaaaagaaaatttgatatttttcttgaaaagaatgttagttatcgtcatgactataatttgaaagttattcgacaagaacttaactcaatatcttcctttaatgaactgtataacttctcccaaaaacattttggtttaattcaaataaagtctgaaattggaagctttctagattttgctttgcagagacagccgaaaatcgtcttagaaataggacttaaaaatgcaggaaactcattcctttttttacattaccttgataatgttgaagacttaatctgtatcgacataaaattaaataaccttggaaaattgaattgtctcaagaagaacagtcagaaaattttatttatagaaggtagttctcaatcagatttttcgataaaaaaagttgttcaaaaattgaacggtcggtttattgatctgctttttatagatggagaccactcatatgacggggtaaaaaatgacttttatgcctatcaacacttggttaaagatggcggtataatagtatttcatgatattgtctctgacaaaaatgagagtgaatatgaacaatcttcttttcgtgagtccttgatttactctggtggtgtgcctaaattttggaatgaaatcaaggatcattatcaacataaggagtttattgagaatcctgaacagcgtggttttgggattggtgcccttattaaagatagacttttaactccttagaagttccctgaaaattatttcaatcgataaattcaaagaaaactcgcaggctttacttactttgattttaagtttatgtactttttggttaatgttttattttcgtcttgagtatgaacaattttttcgtaattattactactattcagtctcctacttctgcaatgcgctgtcttaaccagaaattaacagtagaaggtgcgcaacttatcgttatcggtgaccaaaaaggaccttctgagtacaatttgccagctactcagttttggaatctagatttacaacttagctcaccttataccttggcccaacaacttccaacaggtcactatacccgtaaaaatcttggttatttggaggcaattcgtcaaggagcagactgtatctatgaaaccgatgacgacaatgcgcccttaccctcttgggatcttcgcagtcaacaggtagaagcccacacagttaaccaatcgggctgggtgaatgtctaccgttactttagtaatgaccgcatttggcctagaggttttcccctagattgtttaattgagtctttcgctaaccatattccactacagatacagcctaaactggttcaagccccaattcaacaaggcctagccaatggctccccagatgtagacgcaatctggcgattggtgctagatcagccttttacatttgaaaacaaaccgagtatttatcttccacctagttcctggtgtccattcaatagtcagagtacatggtggtggccagttgcttaccccttaatgtaccttcccagttattgctcttttcgcatgaccgatatctggcgaagctttattgctcaacgttgcctctgggagttgggatatggtattgttttccatcctcctgaagttgagcaagagcgtaatgctcataatttaatgaaagattttgaagatgaggtttcaggttatttaaataacgcaagtctggtaaatactttaaaaaaagttgaattacgacctggtgagtataatgttacaaacaacttaataaaatgctacgattccttagtaaaagaaaatattctgcatcaaaaagaactaatgttattaaatgcttgggtagcggatttgaatgctattcaatactaaaaaattagaccaaaaatataatttttttatccatgagcaaacgattaacttaccttccagaactagatggacttagaggtttcgcaatcctacttgttgtgttttatcatgctaagttggcgggatttgggggaggattcataggcgttgatatattttttgttttgtcaggttacttagtaacttttggactgtatcaagaattagtctcaacaaaaactattaatctaggagaattctttcaaagaagaatcaaaagattacttcctgtattttttttcgtaatactcataacacttgctataggctattttgttctaatacccattgctggggaacaacaagcccttggtagatctgcaattgcatcaagcttatttttgtcaaacttatattttattttcaatactggtggatattttgacgaaccgacagaactgcaacctttacttcacacctggtcactttcagtagaagctcagttttacttaatttggccatttattattggatttatctattttctctcgcgaaaaaacactagtcttttcccaaaaaacctaactattgctttaggattactgagtatagcttcacttttcgtttcactatactttacttataaacaagcttctgttgcgttttttttaatgccatcacgaatgtgggaatttggcactggagggctgttagttttattaccagttcagaagtttaatgcaaatctgggaaactttatatcttctttgagtctacttttcagcttctacaccggaagaggctattaatttaattttatttcttgagagtaacccaaagatttattggggtgaagttaaacatcaacggaaaattatcaactacctatgttacctcagacctttgtatgatttaatccaggctttttctcaaaagcaaaaaataaatactcaaaatctctcaaactaataacttaattacttgttgactaattaaaaagactaattaaaaaaatgtttattccattagaacctttaccaaaactttgtgttgtttcaattattatacccagttacaaccagggtagttttatcaaagaaacaattgactcagttctgtcccaaaactatcgacctttagagattattgtcattgatggtgcatccacagatgagacagtttccatcctaaaaatgtatgaaaatataccagaagtaaaatggatttctgaacctgatcaaggggtagttgatgctgtaaacaagggatttgccctagctacaggagatattattagtatccaaagctcagatgatttctacttaccccatgccgtgcaaacaatggtaaaagcctttgaatctcatccagatgtcggactagcatttgctgatatcattactattgatgctaacggtaaagaactgcgtcgtaccaactttccaccctatacattagaagggtttctcagcaaggaattttatattccccaaccctcagccttttttcgccaagaacttttacaagttgttgggggttgggatcaggattattttattgcagatacagaattttggttgcggatggtgtttcgcactcaagtattaaaagttaatgactgtattgccaaacgtagagtgcatgatgcccagcgtgatcaccaggttgatcgtattgctgatagttactggatgatgattaaaaagtcaccagatttggcatccgcttctttaagactgcgaagaattgcatatgctggagcttatataaacaatattcgctactcctctcacaaactgtcgatttttaataccttaaatatttggcgggccctatttctttacccaaaaatgtggatgtattggctgaaatctcccttacttatccccttttatctggaagttatttcttctcttgcgtttgctaaaaggaaaatttatgagttcacgcgaccagaaactattcactaatatcactcgggaattaattggtgttctttgtaaagatacattccgttatatacccaagttgtatttttccggtgataattccagttgggtgagtctggatagctggatatatctacgcaatcggtatgaaagtttgataagtaacccccatggaccaggtgtgatctgcgattgggagttttccagtcaactacatgcttgtaagatcattcctcattggggtaagcaactgatgaggctggctttggatgattggccaattgaattttccaccacccctaagattaagactgctcccactgtttcttttatctttgctcacgctggtttagatagactacctcaactgaaccaaactatttttagcttatgggggcagttagattcttgtgttgagtgtgttgtgattgatttaacacctgattcagttcaagaacacctcccagaaggcgtgatttatcatcacattcctactaatcatctatcaccaggatggcggaaatcttgggcttataatattggtgcaagggttgcgtcgggggatatactggtgtttcatgatggagatatttgtgttcccaatagatatgttcacgaactactaaagtggttatactttggagattatcaagttgcttccatccagaggtttttattttacttaagtgcctatgaaacagaaaaaataattcaaacccaatctattgtacctacttttgcagataatatcctccagaactggcagggtggaacaattgccattcgtaaacaagacttttttgccattggtggtttcgacgaaggttttgtaaattggggcggggaggatcttgagttttttgatcgctgtaggttattaagacatttccgctttggttacttaccatttattcacctatttcatcaaccacaaaaagatcatagactgataacaaacttaaatactgcaaaggttttgcctgtaagattaagagttaaacctagcgatcgtcgtcatgagttggttcagcgccaatttggaaactctgagtttccagatcccccagttccatactttatagattttgaataactgattttcgaccagatcaacaacctactttttagcatgtgtggaatcactggaattatttctcaatcaccactctcacctgaattttatcatcgtttaagattgatgaatcaggcaatgtctcaccggggtcccgatggttcaggtgagtttgttactgatcatgttgccttggcaatgcgtcgcctaagcattattgatttagtcggtggaaaacagcctttatataatgaagataattccttagttttggtatgtaatggagaaatttataattatattgagcttcaacagtttttatccaagaaaggtcatcactttaaaacagcaagtgactgtgaggtaattcttcatctttatgaagaatatggcactaattgcctaaattatctaaggggtatgtttgcatttgcactttgggatattgggcgcaatcggttgctgattgcacgagaccgaatgggtgaaaaacccatctatttattcaggtcacctggtgttttgattttcgcttctgagcttaaatcactattaaaatctggactggttcgattccaactagatcctgtttctatttatcaatactttcattatgcttatgttcctgaacctcggactcctttaagcgatgtgttcaaactcaagcctggtcactttctgttagtagatgtcaataaatgggattttgagcaaaaatgttactggcaaatggaagacgttccacccttatcgggggatcctacacaactgattcttgagcaattaactgaaattagtgagcaaattgttcgatctgatgtaccaattggtattgcacttagttctggtttagactcaagtgttgctgctgccatggcagcaagagcttatagtggggaagtccatgcatttagtgtgggatatcctgggaatttgcctggcgatgaaagagcaaaagccaggttgtgggctgaaacactaggtattgtttttcatgatattgaaattcatatagaagatatggtaagttcctttccggaattaaatttctggcgagatgaccccattgctgatattgcgggttactgttattttctagttatgaaactggctcgtgaatgtggtgtaccggttgttatgcaaggacaaggagttgatgagctattttggggttatccctggctacgtaaatctgtaactcaaagtttattgaagttgaaaacacaaaatgaaggctggctagcgcttccgagtgttgtgggctcatggcttactcaaatctcaagttttcgaggttttttggggtctgctcgtcgagggtttggtatacctaaaggaaatcaaaaattttatgaatatctttgtaatgattccgatcaactagtgttttatgatatgcaccctgactttcaggaagccgtaaacgcttctgttggtcaatacctggaatttgaatcagatatttcttgggtggtatccctttttagtcaaagtaagccttgggatgatattcccgttgtaattactcgtctgatctgtgaaacttacctattgcaaaatggactggctcagggcgatcgcctgagtatggcttcttcggttgaacttagacttccctttgttgattacagattagtggagaccattattggaatcagaaaaaataatgatgatcatactataccccccaaagaattattcaaaaaagcagtatcaaaccttgtacctgactacatattaaatcaacctaagcgtagtttttctcctccggttagtgcttggtataacgccttatttaagtgttattctggagatatcttagatggttatcttgttcaaaataatgttttaaacccttggggagccatggagtttgctaagggcaaatatccccttggtacttttatgccgctttcgtttaaagctttagttcttgaaacttggtgtcgtcaaatgagtggaatttgttgagcgtaataagctaagttgattataccacaatttcattctttttcattctttgtttggaggtgtctaattacatgaagtcaatagctgttatgcctttaacttgaataattaatataagcaagatgcttgtgctaatgtaacttcagtttttttaattatacagtttagctgcacatcagcttaaatatttaaatgaaaaaattcatgaattaatcgattgaggtgcttatgatcgaaggaatggtatcaacaattattcctgtatacaatcgtcctcaatttctattagaatccgttaatagtgtactagctcaaactcatcgtcccattgagattattattgtcgatgatggttctaccgactctaccccggaagttggccgtcatctagccttacaataccccgaaaccatttgttggcttcaaatcagtaacagtggtccaggtccagcccgcgaagcaggcaaaaaagttgcccggggggagtttattcaatatttagatagtgatgaccgcctgttacccagcaagtttgccgaccaaattcaagtcttacgtagacatccagaatgtggtatcgcttatggttacactcggcttattgatgagcatggaaatgaactttcagatccctttaagtggactggacaggatctaccctatttattccccggtttactcgtagatcgctggtggtgtacccacactcccctttatcgtcgcacagtcactgatgcaattggctgctggtcaaatttgcgctggtctcaagactgggaatatgatgcacgagcaggagctttaagaacacgattgatcaattgtcatacttatgtaagtgaacatcgccatcacactggtcaacgtcaaacctctcaagccgattggtttactgacaccgccaggttacaaaatcgggctgccctactcaaagcattgtggaaaaatgctcaacaagcaggaattagccctaaggataaagaaagcctccatttttctcgatgggcttttttgattgctcgccattgtggtgcagtgggattaattaacgaatgtcaggaatgcctagatttagcaatcggcagcagccaaggggtcaagttccaagatttgaccctttatcgttggttgtgtagactgattggtcaacaactggcatctaaaatcatggtagaaattgctcgtattaaaaacaaccctggacaggcaaccctccctcaatcatttgttaagactgatggggaaaattaatacttccaatgcagggtttttagtgcgggacatcctgctaataattagcaccctcttagccgccatcaatctatggcaacccccaaatccttggttgcgccagggtaaaatttacgtctctccccagggatctgactggaatctaggcaacagtccccaaagggctgttaaaactatacaacgggctgcgaatatggccacaccgggagaagaggtagttattctacccggtatctatcgggaagacctgcgggttcgccgtggggggaggcccaatcgccccattacctttcgcgcccaacaaccgggaacagtaaccatcactaatgctgttccaccacaggtaacacaatatctaacctggcgatcgcatggcaatggactatattcaacccagaccccttggcctatctactatgccctgtataacggcagtgttctttatgatgttcgctgggggggaatagaaagactgaaaaccttagtaagtcaacccaactcctacggtgcttttacctacgatagggaaacaaagcgtttttatctttttctaccccatggagaaataccaaataatcaaaagctagtatttcatcgagaaattccgtcaccgcgagagtggggcaatagtcgggtggcgaatatttggctagaggcacaacatctagtttttgacggtctacggttagaacttggcgttggttctagctttttgctgtgggatagtggttacattactattagaaatactctgctgacaggcgctggcacaggaattagtgcttcacctcacatcaatgtaccatcccatctggtagttgaatataacctttaccataattatccccaatacaactggctaaagaattggcttccctggaatgaagtatacgctcactactcaaactctacactgatttctgcaagttttcctaatttagtgattcgtcataatgtggttagccacggtggtgatgccttgcagatttccccccatctggataaacccgggcagaatggggcaaatatctatggtaatcttttaatgtatggtacggatgatgcgatcgaaatggatggacctgctgaaaaagttcattttcatcacaatctagtttacgactttaaacaaaacctaggattaagtccagttttaaccgggccagttttagcagaaaataaccgattcctgcatcctgctagtggagtcaatggctcccaagtcaagttactcaatccttggtataaacccggttcgcctaataatcaaagcccgattcaaaatattcagattcgcaataatacttttgttgggcgttatcttgcctattggggaccacctgttaaaaatgtatgggtggaagaaaatctctttgccgtggaagggatgaataatcctccttggcatccccaggtcacagttcgcaataataaaatgattacattaccccaggaatatcctcaccccgggaaaaatcttcaatggttccaaggttggtcaataccccgacctggacctggttggcttcaatatgaagatcatccagcaactgtggatatccataaagtcctatccccggatttgtttgggagttatggtagcaagaaaaacaaagagttacgttgaaattgttactcaagttctaactgcatatgaaactagtagcctcccttttattactatttttactgctagtcaagggttgtcaaacacctaaaaccctgtcattccaactcaactctgactccataatagaagcgatggagtatgttgccgattggcagttggcaaatccatctaaacatcctcccacccactggtctcaggccgcttattacactggtatgatggcccttgcggatgtatccaaggatgatcgctatctgaaagccatgaaaaaaatggcccgcagcaatcaatatcaaccaggacccaaccgacgctttgccgatgaccaagctgtcatccaaacctatgcccagctatatctgcgaaacccagacccaactattctcgctcccacacttgaactatttgattggctcctcaccctcccttttgacgaacccctaacctgggacgaccagatccataatcgcgaatgggcttggtgcgatgcattatttatggctcctcccgcattagcaatggtcagccagtccacgggaaatgaaaaatatttacaactgatgaaccgcctatggtggaagactactgaatatttgtatgacccacaagaaaatctctatttccgcgacagtcgattctttgaccaacgcactcctaatggcagcaaagtattttggagccgtggaaatggctgggttatggcaggtttagtacgggtactacaagccatgccacaaaattttactgcccgccctagttatgaaaaactataccgggaaatggcaaaaaagatagccggtttacaacggtcagatggctactggccctctagtttacttgatccaaatcatctgcccaatccagaaaccagtggcacggcattcttcgtttatgccttaacttggggagttaatcacaattatttaacgctaaaagagtacagtccctttattgagcgtggctggcaagccttaattcaagcagttcatcccaatggcaaacttggctatgttcaacccatgtcagttcaacccggggctgcagaatacgaaaccacagaagcgtatgcagttggaggttttttgctggcgggcagcgagttattcaaactcgtggagggcgaacatatgaaaaccaacataaaactaatataagatgagcagcaagtcagtccgccaaattggggtgtatatattcattatccttgtcgccggattgtttggtgccatcggtggtagagtgctgggttacggtttatatcgcctcagctatgattacattgttatcacccaagaacatcaagactggggactccggtttggtctgtttgtgggcgcaatattaacagcatcccacaaactcggcaggagacagcccttttcactggttcaactattgttaggattagtattagtggctatggtcactggcaccggtataggtttgggagggttaattgcccacacagtatatcaaactggtctatggcaaccgagcaactggcaattacctaaccccagtcgccatgctatattcctgggagcattaaccggacgtaattggggggctggtttaggagtcattttcacagtgctatggttacggttttccccccgctaagaaactcagccaaatcaaaatctttctgtatgcctatcatttccgttgtcatgagcgtctataacgatgctcagacggttaaaacctcagtagacagtattttgaaccaaaccttcacagattttgaattcattatcatcaacgacggttcaacagatgaaacaggaacaattttagatcgcctagccagtcaggactcacgaataaaagtgattcaccaagaaaataccgggctaacccaggccttaatccgggggtgtaaccaagcccaaggtgaattcattgcccgtcaggatgctgatgattactcctacccgcaacgtctggaactgcaattggctaaaatccaaagtagtccacagattggtatggtttcctgctctacccaatatatcggaccccaaggagagccactgactattattcaacgatctgaaagccctgaaatagccacccaggaattacttcatcgccgccagggtccggctgcccatggtagtgttttgtttcgcaaatcagtgtacaatgccgtcggtggttaccgccctgatttctattttgctcaagattcagatctatggttaaggatagcagaaaaagcccagtttgccagcttgtcccagatactatatcttcaccgcagggagattaactccacctccggtgttaatcgtgccatacaactccgatttggagaactgggtcaactgtgtaaaaccgcccgtttaaacagccaatcagaatctgtttatctagaagaagcaaaacaactacgcagccaactcctggccaacaaatggcaaaaacatcctcccgaccccttggctgttgctaaagctacctattttttgggatctcaattactaaccaacggcgatcgccgagcagttaactacctgtggcaaacagtacgtctgtgtccctggcactggaaaggatggtttcgtttggggcaaagtattctgcaatttccgatacaaaaaagctaactaatgctaacaaaagttggctttttcttcctgtttcaccagttcgactacgctcactgaacctattgatgatgaactctcctttacgcattctgacagttgccgatactccttgcgatcctaactctggagccgcaggaacagtttattacaccaaccaagcattgagagaaattggtcatgaggtagatgaaatttgggctgatgatttaggacccaggcgcattgctcacggcaatctccattccttgttagaacaacctagagcctaccgtcaggctgttatgaaggcgatcgccacgaaagattatgatgttattcaaatgagtcaacctcaagcttatttagccgccaaggctttaaaacaggggggctttaaaggattggtaatcaatcgcagtcatggggttgagttaagagtggatgaagtgttaccttactggtatcagaaactcggtgttccagaatcgcgttttcctgggttcttaacagcaggtttacgtaagttgttacagcgtcagtggcatgaagtgattaaatactgcgatggtgtcattgttacttgtgaagatgatagccactgtcttgtaagtaagcttaatatcaatgcggataaaattaaagtcatacaccatggagttcctgaagcatttttcaatacaccgactcaatcatattccttagaaagacatcagcaacttctctatgtcgggcaatctgctttttttaaagcaccactcatcttagctgcaatcatcaacaaaatattactttctaatcccgatgtcacaatgacatgggttactactgttaactcccataattacttaaaatccttgcttaatgcccagattttatctcgtgtagtatttctagattggcaaccccaagaaaaacttattgctttatatgattcatgtggaatttttatttttccctccttcgtagaaggagcagggaaaacctcattagaggccttgtcaaggggtctttgtgtagtagccagtaatcaaggaggaatgaaagattatataaaatctggagaaaatgggtttttatgtgaagttggtaattcagaggaatttgttaaccgaatatccttacttttaaaaaacttagaattttccaccaaattgagcaaacaggctgtgactacttcacaatcctacacatggaagaaatgtgccaccgaggcaactcgtttttacatacaagccctgtttaaatagaacatattttgaatatgaacctcatacaaatagtagtcaaagaattcaaagatacactggagcgaccgcaacgcttaggcaaattatttgattattcatctctcaaaaaatggctgagatttcaagagattagagttattgccaggaatgactggaaaaacacgggaaacatttctcagagaaatgtcccatcctatgaccagtatatcaagcttcaaaaatctaagcttgaatacctagacctatctagccatgaaaaaaaatttaggacatctttaaggcaaagattatcagagttacattcacaggattatatcaaaccctcaaaccgtacagcattgtgtcttggtgcaagattaggtgctgaagttgcggcctttcgagatttaggctattttgccgttggcgttgatttaaatcctggtaacaacaatccttatgtcatgtacggtgatttccacaaattagaattttccgataattctgttgatgtaatctattcaaactcccttgaccattgttatgagttgaaattaatactttcagaaatcaaaagattacttaaaaatgatggttacttgatcattgaagccgaccctgggtcaaatgaaggaattagtcctgatttgtgggcaacaatgagctatgagactgtcgattctctgaagactgaaattgaaacatcaggattgattctggttcaagcactaccctttgaatatcctcgaaacggaactcagttagtatttaagcgctaatttttgcatctctcatgtttaaaaacaacccattgttatactaccttacttactggctatctattcagcctgccttgacacaaacaacttcttcttaattaggggttgctgagaaagtctttccgtgagggcataggagtcaggagtcaggagtcaggagtcaggaggagatttgaaaatttctttgccatctcttgaaatcccaaaaaatgcacactttttccggtatacccttcaaaacccttgcactaatttctgtgtttatcagcctctaacctttgatatatcaaggttttaggtttattcagcaaaccctaattaatcattgcttaactaacggtattggcacaattgtattcgggtggaataaaaaacaaaaagataaagctgatctgaggaaacttaataatcaaaagtttgttcaaattccatcagctaaattaaaaacccgtattgagcaattatgcaaccaatataaaatttgatagcaccgttgaaggttcgtttgtggactattcaagaatcccccggcttttagccgtggggagtatcaaacagcaatttacctattttatcaaaaaattatcaataaaatcagtaatttcctgataaaaaacccgccctttttccctactactactcgcagttactaataaccttaaagtttccaccaatgaactgatagtagcatcacaaaccaaatcaaacaactgatttaaatcatcttggttttgttgtccataagccaaagcatgaatataatcattacgaatttgattattaatcactacaataggatacccggcacgaattaacaataaattcattaataatctagccgttctgccatttccatctcgaaaaggatggatagaaacaaaacgataatgtgccatggttgcatattctacaggatggattgttaaagcagcatctgaattgagccagatcacaaaatctgtcattaattgagacagtaaataatggggaggataaatataatttgtccctgctaccattacatctaattgccgataagaacccgcttcattagggtgaattttcctcagaattagattgtgaatttgtttaatttcccattcattaattactgtatctttttgggctaaactctcaatatagtcaatcgcctccttatgtccaactacctctaaatgttcatcaagagtcttcccaccaattgtaattcctttggttaacactaactcagtttcactttgagttaaagtattgccttcaatggcattagagttataagtaaagcggacatcatacagctttttgagttcggtgattattgtttgatcaaatggtctaaaatcatctaaccaggcttttaacttgtctatttgttgtaatttaagttggtaattcatgctaatatagttactgattaaagcagttaaggaaaaatctgttttttgactatctgttttttgacttaaaccaataacctgatcaataaacagttcataaagctgagaataggatactagcatagggtctgtgttcatcctgtaaattatccttttcaccaagccctattgaggttgcttagtgcaagagttagctttcaaagccacccattttttctatagtcggatctagaattgtcagcttaatagaacccagtttagcagttgtccagcgaatttgtgaggttaaaacataaatccttaaaccttgactgaaaaccttattcttgcctaggggtaattcatgaattaccctgagcggttagtgagcagagcggttagtgagcagagcggttagtgagcagagcggttagtgagcggagcggttagtgagcagagcggttagtgagcggagtcgaactatgtcgaagtatgccagcgctacaagggttttatcattaatatctgtacctcatcatcacggaaactgctgtaactttttcagcaaaccctaactaggggttgctgagaaagtctttccgtgagggcataggagtcaggagtcaggagtcaggagtcaggaggagatttgaaaatttctttgccatctcttgaaatccccaaaaatgcacactttttccggtatacccttcaaaacccttgcactaatttctgtgtttatcagcctctaacctttg

SEQ ID NO: 48 - DNA, 41017 bp, Sphaerospermopsis sp. LEGE 00249
  LEGE00249_63
tcctgtaagggcgaagcattcgggcgataaattatcaatttttatcacaggttattttcctgtaagggcgaagcattcgggcgataaattatcaatttttatcacaggttattttcctgtaagggcgttcgcgaagcgtgctggaagcatcagcattcgggcgataaattatcaatttttatcacaggttattttccgaatgcttcgcccctacttcgcccgactgctacacccttacataagtcagaatatttgataacttcgtatcttatcaattggttattttaagaataacctgtaaataactgactgctgactaatgatagctaaatactaacattaaactaactgctaaacacttccactggtaaacgactaaaagctagacgttcattttgcacatcaacaaaaattgtatcaccgtcattaaattcaccccgcaaaatagctttagcaatttgggtttctaactctctttgaatggcacgttttaatggtctggcaccaaatacaggatcataaccaacttctgctaaaaagtctagtgcagatgcagcaagtcgcagggacatttttttatcagttaatctttgtctgagtctatctacttgcagttgcacaatttctcgcagttctgatttttgtaaaccgtggaagatgataatttcatcaatacggttcaagaactcaggacggaaactattccgcattgtttccatcactcgatgacgcatttcatcataccttgaatcatccccagcaacatccagaatatattgagaaccgatgttactagtcatgatgataatggcattcttgaagtctaccgttcttccttgggagtcagtgacacgaccatcatctaaaatttgcaggaaaatgttaaatacatccgggtgcgctttttcaatttcgtcgaataaaattactgcgtaaggacgacgacgaatagcttctgttaattgtccaccttcttcataaccaacataacctggaggcgcaccaattaaccgagaaactgcgtgtttctccatgtattctgacatatcaattctgactaaagcttcttctgtgtcaaacatataagcagctaaagctttagctaattctgttttaccaactcccgtaggtccaaggaaaataaaactagcaatggggcggttaggatcagcaagtccagcgcgagaacgttgaatggcatcagctaccgcagtcacagcttcactttgtcccactactcgctgatgtaattcatcttctaaatgcagtaatttttctttttctgattccactaatttactaataggaatacctgtccatttagaaatgatttcggcaatgtccgcttcggtgacttcttctcttaataatgattttcctgttccttgggcgttagctagttccctttctacggtttctaattgtcgatgtaattctgtgagtttaccatatttcaactcagcagcgcggttaagatcatagtttctttctgcttgttgaatttctaagttaactcgatcaatttcttctttgatagattgaatttttgtgataatatctttttcagattgccattgggcgctgagtgcgcgttgttcttctttaaagtcggcaagttctttttctagtctttccaaacgttcgcgggaagctaaatcactttctttttgtaaggacagtttctccatttctaattggagaattttccgatcaatttcgtctagttcttctggtttggatgtaatttccattttcagtctagcagcagcttcatctaccaagtcaatagctttatctggcaggaagcgatcgctaatatatctactcgataaagtcgcagcagcaactaaggaactatccgaaatttttaccccgtgatgcacttcataccgttcctttaaaccccgcaaaatagaaatcgtatcttgtacatctggttggtctacataaacttgttggaaacgtctttctaaagcagcatctttttctatatatttacgatattcatctaaagttgtcgctccaatacaacgcagttcaccccgtgctaacatgggttttaataagttacccgcatccatagctccttgggttgcaccagcaccgacaacggtatgaatttcatctataaataatacaatatttccaccagattcggtaacttcttttaatacagctttgagtctttcttcaaattctcctctaaattttgcaccagcaattaacgctcccatatctaaagcaattaattttctatctttcaaagattggggaacgtcacccgcaactattcgctgtgctaaaccttccgcaatggcagtttttccaactccaggttcaccaattaatacaggattatttttggttctccgagaaagaatttgaatggttcttctaatttcatcatcccgaccaattaccggatctaattttccttgacgcgctgcttctgttaagtcacgtccgtatttttctaaagactgatattttccttctggactttgatctgtcactttctgactcccacgaatttgtttaatagtattctttaatttgccttcgtctaaaccaatttcttgcagtagacttttaccaaatctgtcatctttagcatatcctaataatatatgttcaacggaaatatattcatctttaaattcttggcgatatttttccgatctgtctaataatgtatctaaacttttacccaaatatacagatgtgctacttcctgatactttgggttgacggaaaataaattgttctgtgtaatctctgatttttgggatgtttgcaccggctttcgtgaaaatagcgttagcaagtccatcctgctccagcagtgctttcattaaatgttcactttctagttgctgttgttggtactgtttagctatttcgggagtttgcgcgatcgcttcccaggctttttctgtaaattggttcggattagtcggttgcatagtttttttgatatttgactttcatatcgtcattgtaaaaataccctagcctttttctggatcggtcttcccatcctcattatgtagtattatcccaagttatcagttatttagtttaagccgatcatgagtaattgataattaattatttactgtcacctgtcacctgtcacctgtcacctgtcacctcaataatatataagttttttaaatctctgatctataaaaaaagtgtgcgatgtggtttattgagaattagccccctttattctcaataatcttgagaattactatcaattatcaacgagtttccgtcgtttcaggattgatattgacacacaagatttttgtggtatgatatgtgtacgatccaagggtaaattatgatttaaaaaagaattaaaaaatatgtaaaaccttggtgaaagtttttcttttttgtctaattttgcttaatgctttttgttgcacgcagaggcgcagagtcgcagagaagagagtctataaatagaagtatgtgtttaccatattattggtattgggtttgaataacaaaaatatagtcatatatgatgtttgggtgttcgagaaattatattaatttaatttttaccaatcaccaatcaccaatcaccaattaccaatgccgaaaaaacaaaagtttcctcatttactgggttctaagtggacagcacagcaaaaagttgatggttggcgacattttcaagttgttaaccgtaaaaatcagggtaaatgggtctatgctgaaatggtagccgcttgtgaccctaatgtacgtttttggatcaatgccaaattattacaggataactctcaatggcacgccggctggcaatctttacaggaaattaatgatctggaaaaaattaataacattacatgatcatacataaaatttaactatttcatgatttgattaacttttctcagatatttgaatatttaatattaattaacaacaatgatcgcagatactcagagatcaaagatagatgcagattacttttgtgttcctccagtcccaaaaaccctaaatttaccctaaatttatatcctctctcaaatctcaagtctattctcctggtatgcactgacgatagttatgctcatcattaataacatcttatttgctgcttaataaacttgagcaatgattggataattctatggaaaccattaataaaatactattttagctaatttgtcttttgtaactatttttatataaaaaatttaaaaatagtaataaatcaattttttaagattttttagagattttagagtttattttacgattaaatatcaaaatatctttctaataaatcaattatctttgattttatgatttttagaccctttgcttttctaggaatttgcacaataatggcactcacagacctcacacatctccataactggttgagtgctgggtaaaggtacaagctaagaaaagaaactattagaggtaaagaaaaatgaaattagcagtgtatggaaaaggcggtatcggtaaatccacaaccagctgtaatatatccgtagccctagctaaacggggtaaaaaagtgctgcaaattggttgtgaccctaaacacgacagtacctttaccctgaccgggtttttaattcctaccatcatcgacaccctacaagagaaagactatcactacgaagatgtttggccagaggatgtgatttataaaggttatggtggagttgattgtgttgaagctggaggtcccccagccggtgcggggtgtggtggttatgtcgtaggtgaaacagtcaaactcttaaaagaacttaacgcttttgatgaatatgacgtaattttatttgacgttctcggtgatgtggtttgtggtggttttgcagcacctttgaactatgccgactactgtatgatcgttacagacaacggttttgatgccttatttgctgctaaccgcatcgctgcttccgtccgtgaaaaagccagaactcaccccctgagactagcggggttaatcggtaatcgtactgctaaacgtgacttaattgaaaaatacgtagaagccgtaccgatgccagttttggaagtattgcctttaatagaagatatccgtgtttcccgcgttaaaggaaaaacgctgtttgagatggctgagtcagatccttccctgagatacgtttgcgactattatttaagtatagctgatcagatattagcgcgtcctgaaggtgtcgttccgaacgatgcccctgatcgtgaacttttttcacttttgtcagatttttatttaaatccgagtaaaccacaggtaacaaatccggaagaggaattagacttgatgattgtataaaacaatttacctcttcaggatgggggaaattatggccttctttgatagttttacggattcaatcaaacaaaagtggttacagttctttcaagtcaaccgtgactggattaccttgcaaatggcagtggaatcggtttctacccccgatggcgggaagcgtccttcctcttacctcattctgggagtagtaaatgccctagaacctaaattagcccagttgatgtttccttttgccaaattaaatcctgatgctgatactctaattgacgtgctagggctgcattttgatccagatattgtccttggtaatcggttgagtcctacccaagaaccaaaaatgtattctcatgcttcccaagaggttacagaagacatttctgaagatcaaccatcagcagttgatgatttcagcgttgttgaggaaaaaaactctgttcaagagttaacaatggacgtaagtgaacatcaatggcaagaagaagattcactggtaagtgaagatgcgtttgattcaatttctttatctgaagaaaacatcacagatgagtttaaatcagcacctgatttagaaacagaaaaagactttagcgggatgtcttttgagactgtcaatttaacagcagataacgaacatcaagctttagatgatttcaatctatccgatgaaaatggatttgatgatttaaatcaaccagatgaaagtgaatttcgtgatgtgatttctgatgtttggggagatgattcatctcttctggaagagggtgaagaaaataataaccttttaggtgaagaattaccttctgaggtttttgatgagtcagaaatggctcgtctcttccccaacaattaaatcagtgaataggggaatggggactgggaacagggaacaaataggtaatgggtaatatttatctttttcctgcctcctgcctctcctgcctcctgataactaccttgtacgccttaaaattaaggggagaagattacaatgactatcgctacagaaaataccgctttaaattttgaatgtgaaactggtaattatcatactttttgtcctattagttgtgtggcttggttatatcaaaaaattgaagatagtttctttttagttattggtacaaaaacctgcggttattttctacaaaatgcgatgggggtgatgatttttgctgaaccccgttatgcaatggctgagttagaagaaggtgatatttcggctcagttaaatgattatcaagaattgaaaagattgtgtgagcaaattaaacgcgatcgcaatcctagtgttatcgtttggattggtacttgtaccacggaaattattaaaatggacttggaaggtttagcccccaagttagaagcggaaattggtattcctattgttgtcgctcgtgctaatggtttagattatgcttttactcagggagaagatacggttttagctgcaatggctaaccgttgtcctgataaagcaccagtttcagaaacagaaaaaaatgaacggaatgcaattcaaaagttattacatttcgggaagaaaaaggaagatgttgtacaagaagaatcagaatatgtagatcatccacctttggttttatttggttctttacctgatccagttgttacccaattaactttagaattaaagaaacaaggtgttaaagtttctggttggctacctgcaaaaagatttacagaattacctgtgttagaagaaggttattatgttgcaggtgtgaatccttttttaagtcgcactgctacaactttaatgagacgcaggaaatgtaaattaattggcgcaccttttcccattggtccagatggaactcgcgcatgggtagaaaaaatctgttctgtttttggcattacacccaaaggtttagatgaaagagaagcgcagatttgggaaaatttagaagattacgtgcaattaattcgcggtaaatctgtatttttcatgggtgataatttgttagaaatttctttagctcggtttttggtgcgttgtggaatgactgttccagaaatcggtattccttacatggataaacgctatcaagctgcggagttagctttgttagaaaagacttgtcaggaaatgaatgttcctttaccaaggatagttgaaaagccggataattataatcaggtacaaagaatttatgagttaaaacctgatttggtaattactggtatgtctcatgcaaatcctttggaagcgcggggtattaatactaaatggtctgtggaatttacgtttgcacagattcatggttttggtaatgcgcgggatattttggagttggtaactcgtcctttaagaaggaataataatctaaaagatttgggttgggataagttggtaagggaggaagctaaggtttaaaacctagataagttttaaagtttgcgtgttctttggcaattttcgggcggatcttttggggttcgtccttttttttgttttctcacgcagaagcgcagaggacgcagaggaagagaatatgttaaaatatgatgattacaagaaatatagtatcaggtgatggaatgccggaagtttgccgttttttaggaattattattaccatgtattataatgatcatcctccaccacattttcacgtccgttataatcaacaaaaggcaattattgatatagaaacattatcaattttagaaggtaaacttagtcctagagttttaggtttagtaattgaatgggcagcaatgcacaagtcagaacttctcaataactggaacttggctagacaaaataattctttagagaaaatcgaaccattggaataaattatgctgcaagatattatagaagtcattcctcaaaataactataaactctatctgaaatttgaagatggaaaagaaggtattgttgatgttagtcagttaattgaatttactggtgtttttcaacctttacaagatttagaattttttaaaaccgtgaaagttaaacctgaatggggaacaatttattgggataatggcgcagatttagatcctgatgttctttattccgtaattactggtgaacctatttctagctatcatggaaatcaatatgtggaaatttctcactaagttagaatttatcgccacaaaaccagccttattaaaaactaaaaagccttttgtagtaactaagtttcactttttcaaaatgtctgaaattatcaccctccaactaccagaaacactggcacaaaaagccaaagaaatagccgctttcacccatcgcagtctggaagatgtattaatagaatggataaaccgcgctagtcatgaattacctgtagaatcattaccagatgagcaggttttaaacttatgtgatttgcaaatggaaagtcaacaacaagaatttctcagcgaccttttagcacgtcaaagagaaggactgttaaatgagatagaaaatagtcaacttgacgaactaatgcaagtttaccgacgtggtttagtacgtaaagcacaagccttaaaagtggctgttgaacgtggtttaatacctgcaatcaattaacagtcatggctagattttacattcctgtcgaaatagaacgccgcgttagaaaagatgctcaaaatcgttgtggatattgtttaagtccccaacgtttagtaatggcacggttggaaatagaacatattattcccatagctaaaggtggtagtaatgaagagtcaaatttatggttatcttgtcctatttgcaatagatataaaattgataaaactacaggtgttgacccagaaacaggagaaacagtcaaattatttaacccacgtactcaagtttggagtgagcatttttattggacagaagatggcatacaaattgtaggtaaaacgccgactggtagagctactgtaaaagctttacatttaagtgatgatgcagatactttggaagttcgcagttattgggttcttgctggttggcatcctccaaaagattagataggggatatgaatggggataaatgatactaattttatgggagtttacaatttatttatgtgttataagtaaggaataaaatttatgaaatctatgaaagtgtggtcttatttaaatgaaaatgttgattaggttgattcagtaattaaggtattaatattttcattaccgcctgtttttttagtgattcaaactgcattatatttctttttaaaggatttttttctattctgaatttgtggggagttactagggcatctagtggtaattatatagcaatatttacgcacatttttataatcttgggatataagtttaattgtattttcaatttgtgtaaatgcgtgttctacatcagaaccttttaattctatatatatttcaagataaggttcattgataattaataaccaatcacatttaacaccttgaatatctaaacagccatctacttgaatcttcgtaacttctattaatttttcattgctgaaaattattttactacttttcttttcttctattaaaatatttttatgggtaatcttttcagaacatttatctaaatccacaaattttattctccaaattccaggtctattaatttttcaaaaatcatactaaattcgttggatacatcatcaataatatttgtatcaattaagtggttttcttcattaattaaactttcaatcatgccatttttgatagtgtaagcagcaatatcattaatatctaacatctgatttgcgggaactattttaaataattctctgagtaaatcattttgttcaggtttttcttttaatgctttaaaggtatttcctgcttgaatgaggttattaaaagctgttaatatgtaaggactgtgagtagtaataataaatttatgttttctttcggtggtattgaaaacttgactaattaaactaacaatctgtttttgtgatgtaggaaataaatgtgcttcaggttcttcaatgataaagatgcgatgagatgaagtgaaaaaaggtaaaattgctaatataagtgccataggtaaagcctcttgttgtccagatgaagaatgagacaagtttattttcctgtcatcgtcagtgtatatccagtcttctcctttttcacgaatatattttccaacaattattttatttactaattcatcaatatcatctttatattctaataaattgatatcttttctggcttgatacaagtttttagctctttcataggctgaaccaaattctttaagaaaatagtcaatggtaatattttctgataaaaaagaaaacacattactttgtaaaacggcaaaaaatgatctacctgcgggaataaaagttaataaatcaagattgctgatattttttcctgatagaatgtattttgaaaatatctcatctataaattctcctatatttaatttgctaatactggaggaattatgttgagttttatctgtatcatcaataattgtttttgtatattcagaaagtaattttctacgaatattaattagatgttctgaatattctaaaattagagtatatttgtttttggtggattgcttggtatacaagcgaatataataattttgaaactcgtaacttatgtgatatgtgatatcaaattgttgaaaattccaagaatattcaggaaatatttctttgaaattcttaataatgcttttatcaaattcactttttttgcggcttttaaaaatggaatttctatattcaattaagaagtttttaaaaaaataaactaatttggcaattacgcttttaccactggcttcttgtccaataataatatttatcttggataaattaaattcaatatcattgatgttaagaaagtttttaattgttaatttttccataagtaaaattggagaattactaatatgtttgtattttttaatatataaattcgcaatatatagcgtttcccaatctggtgaattacaaaaccatctgcgtctatttgtatttaattattactacttgcacatcacttgaatgggaattttaatattatacataatattttgcaaatttaaaatccgtaaaaatatcatcatttaatgtatcatcaaatagtataagcaggtatcattcttaatcatgaaagccttttccagtaactaaattgcaggatgttgcaggttgtttaaaatatgatggtgaacctgcaaccctggaagatatggaagatgctattcgtcaaagtgttgaggaaatacagttttaaacaggtaattctaaagtatgaagaagcgaaaaggctgcttgaggatgaatatgagcgtgtggaaggtcgagttttagcggaacaggtagcttaatttttttctaactttactttgatgtttttcaggttagcttagttatatgttattatatcaaccattgactttttataatttaccaaatcttcccatacatgaaacgtctttactacggtgataatctccaagttctcagagaaaatattcctgatgaatctattgatttaatttaccttgatccgccttttaattctaaagctaactataatattatctttaaaaatgctactggtgaaaaatcagatgcacaaattaccgcttttgaagatacctggagttggggaatagaatcagaaagatttttagatgaaattcaagataaaaaaggtgaattatatcaatttttagatttattagtaagaacattaggtaaaaattcattatcagcttatttggtaatgatggcaatcagattaatagaattacatcgggttcttaaatctacaggtagtttatatttacattgtgatactaccgctagtcattatttaaaaatgattttagatttaatatttgatgccagaaattatcggaatcaaattacttggaaacgtactagcagtcatagtgatgctaaaaagtatgcgagaattacagatattattttctactatgtcaaatctaacaaatttacttggaatcctcaacggttgagttattcagatgaatatatcaaacaatattattgtaatattgatagcgacgggagaagatttcaatttggtgatttatcaaatacaaaaactagcaaaggttatttctataaactgttagattgtgatcctcctgagaatggttggagaatgccagaatctcgcgctcaagagtggctaagtcaaggtaaaattgccataccaccaacaggaaaaacaccacgttataaacgttatttagatgaggttcaaggtaaagttatccctgatatttgggatgatataccacctattaattctcaagctaaggaagctttaggatatcctacccaaaaacctttaacattattagaaagaatcattcaaattagtagtaatgaaaatgatatcattcttgatccattctgtggatgtggtacagctatccatgcagcagaaaatttaggcagaaattggatcggtattgatattacccatttagcaatttctttaatagaaaaacgtttaaaagatgcttttccgagtaaatttgttgaagatgaaaataaaaatcaaaagttagtaccagggatagaatttgaagtagaaggtacaccacaagatttagccgcagccatagatttatttaacagagacgcttatcaatttcaatggtgggcgtgttctttggtgaatgcacaaccttataaagataaaaagaaaggtgcagatgggggaatagatggtttaatcttttttgaagatgttatagatattaaaaaattaaataaaacagcagttaaaaaaatcattgtgagtgtgaaaggtgggaaaaatattaacgcatctatgattagagatttgcgcggtactatggaaacaaataaagcagaaattggattatttgttaccctcacacctcccacccaaccaatgattaaagaagctgcatcttccggtttttataaagctggaaatggtagaaattacgctaaaattcagattttaacgattgaggaattattaacaggagaaaaacgaccggaattttttgatatgaagcagggagaattgacatttaaaaaagcacaacgcgaaaatcaagatataggagaacagggggaattgttttagatgatttttatggagatattaactaacaacaaaaactaacaacaaaaactcatgacttacgcaaaagggaacgaaagtaggggtaattcatgaattacccctacgcaagaataaggttttcagtcacatcttgcgtaagtcctaaaactgtatatctacgcaggtatatttatctagatacagcagatttcagatcaatcaagatcaatcagttatagaatctaaattgaaacctatacagaaagagagttttactcctgactcctgactcctgttgtatttagataaagcacgaggtacatctgaggtacatcttgagcttccttgtcagtgggaaatttgattttttcttcaggattaagtttattatgtaataatacctgttgacaaagtgctaaaccttgattccaagcgtgtctagctactcctgcgtgttgcgccagtagtagtcgttgttgcttgttaactttgagttgggttttgaatcctagtagcatacagtgattttactgtaattctgtcacaaagccaaaagataacaggaaattttcagcaaatgtgagtatttgttattattggttaagaaaacagtaactagctactaaccctctctactatccagaaacaacttctcaactcgaaccccagaaaaagttttagactgataaagacacaagctttaatgggagtgtcaactgctcaattaggactcaagaatcccgatgttaacaggtacaattttgcagagtggaaaatataccattatccaagaaatagggagaggtggatttggtattactttcaaagctacgcatcattacttaggtcaagaagtagtgatgaaaactattaacgaacggctcaggcaacatcctgattttcctaaattcgagcgtcaatttcaagatgaagctagaagattagccgcttgtgtccatcctaacattgtccgagtcagtgacttttttgaggaaaatggtttaccttacatggtgatggaatatattccaggggaaactttaggtcaagcttttgtgtcaccaggaatacctttatcagaagcaaccgcaattcattatattcgccaaattggggcagcattgcaggtggtacataataacagtttgctgcaccgagatattaaacctgataatattattctccgccaaggcactcaggaagttatactgattgattttggcatagctagagaatttaatagcggtgttaaacaaactcacactggtttagtgagtgaaggctatgcacctattgaacagtatttaagccaagcaacacgcaccccagctaccgatgtttatggtttagctgctactttgtatgcacttttaaccggacaagttcccataccagcattattacgagatagacaaccaatgccttctccccgtgaactgcaaccctacctgagtgcagctattaatcaagcagttatgcgcggtatggctgtggagtctcggtttcgtccggcgacagtagcagaatggttacaattgttacctggaagcggtttggagatgacaccgcaattacttactcaacccgcaccaacgattaatgtatcagcactagaagcagaaaatcggcaaaaacaaccagcacctattcctgctcctatatcatcaccagtaagtaaagttacagtattactaaacaaaattgttacatctaaggcatttcttagcgtgggtgtagctttggtagctatgacagcaggatttactgtgacaagaatgttaccgaaatctcaatcacaagcccccaagccactttttgaacaacctcttcaagaacctactacaccacaaccggtagttgaaactacaccttcaccggaaaatcaagatcatcaaactcaatcttctagtgagtcggcatcattttctacttcagaacgacgcaagcgcaaacgtaatttttccccagaaccaactcccactaacgagagtgtttctccagaaactgcgcctgaacaagaaaattcttctgaacttacacccggcaaaaatcagcaaactacatctacaccagtggttactcccacaccttcattagtggagaagctacgggaagctaaatcatctcctcaacctaccccatctccagaaaaagaacaagaaaatatctcaccccctgctattgaaaataacgattctgctcaaccggaaaaaccagaagcacctgtagttataccaacagcaccgccacaaccgaaaaattctgtggttgtacccacaacaccacctaagcaatctgagagtaaagattcttctactgtggttgtaccaacacaagaaacaaattcaaaagaaaaaaatgcaaatgcacctgctaataataattagggaatgctattgaaagtcttctcgtggaggccggtaagagtttggtttatctgttggtaacaaaattttttcatctttcctaatctcctagcagatagaggagtatataaaaaattatgctccattagctagaagttagaaaatattcaggtttttataatttgaagtcattacgcagtctgcttaaaaaacgtcatacactcatcctctgaaataggagaaataattatgacaatgacaggattagatacttttgatgctactgtacaaaaaacaattccttggattaatgagttagcaaaagagttaggttgggaaaataaacaccaggtttttcaaggtttgcgagctacattacacgcattgcgcgatcgcttgactgtggaagaagctgcccatttgggagcgcaattacccattcttctaggtggattttattacgaaaattggcgaccaggtgcaaaacaaactaaagatagaacaaaggaggaatttttacagcatattcgggattatttccgcaatgttaatgctgatattgatccagaaactttggtgcgtgctgtcttcaaagttcttgctcaaagagtttccccaggagaagttgaggatgttattcacatgatgccccctgctttgcgagaactttggccggaaactgtgcgtacttaatttactaattaaaatggggcattttcatctttgttgagttgccccaaaacacatttcaatggtgacaaataaataatcctgtactgagctagtttctaagttttttattaattaaccgcaaagtacgcaaagtacacaaaggaagagaaggaagagaaggaagataattagtaatcttttgggggaaagggagtaaaatcaatattttcagggtattttgttatttacgattgattgagaattagtatataatattttcgcacctttatcataaaaacagatgacacaggggaaaatattactcgaaccagggactttatggaagagggtaaaacaaactacaacacacgctttagaatgtgaagctttaaaatctattcccacagaatttgaatttgtggaacaagatggggttaaatttttagtgagaattttagcaaatctcaaccgtaaaaaagccgcaaaagaacaacaagaaaaacaaactgctaagacaggtaaagaatttaatccttttttaccttatgaacaagatttatttgtaactgacatttccgaaactcatgtttgtattttaaataagttcaatgttgttgattatcacctattaattattacccgtgcttttgaggaacaggaaaatttattaactctcgaagattttacggcaatgtcggcttgtttggttgactttgatgggttagtattttataatggtggtaaaattgctggtgcaagtcagcgacataaacatttacaaatagtaccaatttctggaaaagaaatacccattgcaccattaatagaaacagttaaatttacagaaggtatcacaactatacccggactgccttttttacacgcttttacaacttttgcacctaatgaaacagcaggggtgacgttagcgaaatattatgctttactagagatggtaggcattcaggcagttgataataatcaacaatcgggagcatataattttttagcaacgcgagaatggatgttaattataccacgtttgcaggaggaatttgagtcaatttctattaattctttgggctttgctggtgctttgttggtgagaaatactgaacaaatgcagctagttaaagatattggtccaatgaatattttaaggaaggttgctttgagaatttagatccccgacttctgagagcaattgataattttatacagaagacaaaaaagaagtcggggatctggtattacaaatcaatgaaaattatctgcgtttatctgcgtttatctgcgttcatctgcattaaaaaatctgttttctctccatgaggaaattaatttatggaatctctagatataaaatggattagatcgcaatttcccgcattaaaccaaaccattaacggaaaaccggcgatattttttgatggacctggaggaactcaagttccgggtgcagttttggataatatcaatgattatttagttaggtctaatgctaacgctcatggttattttaccaccagtgcgcgaacagatgcggtaattaattcagccagagcagcgatcgccgattttttaggatgcgatcatgatgaagttgtatttggtgcaaatatgacttctctcgcttttagtgtcagtcgtgcgatcgctagagaattacaaccaggtgatgaaattattgtcacaaaattagatcacgctgctaatatttctccctgggttgctttagaagaaaaaggtgtaaatgttcaatttgttgatatcaatatttcagattgtaccctagatttaaatgatttagaaaccaaaattaatgaaaaaacaaaattagttgctgtcacctatgcttctaatgctgtgggaacaattaatgatattgcaaaaatagtcaaattagcccatagttttggggctttagtttttgttgatgctgtacattatgcgccccatgcaccgataaacgtccatcatttagattgtgattttctcgcttgttcagcttataaattctttgcgccccatcttggtattttatacgcaaaaaaagaacatttaacccgattttctccctataaagttagacctgcatctaatgaagttccatcgagatgggaaacaggaacattaaatcatgaaggtttagcgggattagtagcaacaattaattacttagctaaattaggttgtcatgtttccccaactttagataatgaattactggaatctttaatagcagcagatagagaaggtttaacgagttttcattgtccccggtttttaacttcagaaacacaagaaaaccatgaattagcatcagcttatcatagtcgtcgtgcagctttgttagcagcaatgacagcgattcaacaatatgaaagagaattaagtaaaaaattgattgatgggttgttagaaattcctggaattaaggtttatggaattacagaaccggaaaaatttaattggagaactcccacagtttccatcacaattgacaataaaacatcggcagaaatagcgaagtttttaggagaacagggaatatttacttggcatggaaatttctatgctattgaactgacagaaaagttaggtgtagaaacatcaggagggttattaagaattggattagcacactataatactgtagatgaaattgggcaacttttgcaagttttaaactgttaataactcaaatatcccccttaataaggggagcatcccaattttgaaaaaataaacacagccacactaaaaaatctcttaaactctcttacctttgtgtcctttgcgccctttgcggttcaatcatattaaacctagtataattttctgccgttagataaaaataaatttacacatttaggatgattttcttatttattcttcaccctgattttgacgatggttagcagcttgcaataacaaagattcagcaaaagcgatcgcctgatttgcagattttccacccgctaattgtgctaattcatcccgacgggtgtttaaattatctaaactggtaactctgacaactgtcctttgttcagtgttaccatttttattaattacttgtttatcaactcgaaaatgacgatctgccattgccgcaactaaaggttgatgagtcacacataaaacttgttgattttgacttaattgatgtaatttttccgcaatagcttgggcaactctaccagatacacccacatcaatttcatcaaatatcattgtttccgccccatcttgttgattaaaacaagcttttaaagctagtaaaaatcggctcatttccccaccagaagcaatttctgttaacggttggatgggttcaccagggttaggactaaacataaaagtgattttatctgcacccatagcagtgggagaagttggtgtaatttccacttgaaatttgaccttttccattgctaaaggtttgagttcagctaataaatgagatgctaaattagccgcagtttgccgacgtagttgggttaattgttgactgatttggttaagatattgtaaaccaacttgttcttgttgttctaaactttctatagattgttcttggttattaagttcagctaattctatttgaatgcgttgataatattcaatagcttctgtgagagttggtccatattttcgacaaatttgttttaattctcggatgcgttcttctacttcttctaatctttgcggatcagcttctaaactttcgccataaatgctaatttgtctacccacttccatcacggtagcgactgcatcccgcactaattctaaaatcggttgcagttgggaatcaaattcaacaatatgatttaatatagtttcactatcacctaataaatcagcagcagtgggagattcggcatcattttgatataaagattgataaattttataactcatttgttgcaaatcaacaacatgatttaacctctctctttcctgggttaataattccatttcctgcggatcatcaagatttgctgcacttaattcctgaacttgataggtcagtaaatcgagttgttgtaagcgttctctttccgaagtgcggcgtttttctaaagtttggtatgtttgttgataggcactataagcaacagaaacctgttgacgtttttgaattaaattatcaccaccatataaatctaaccaatctcgcacctgtgcagattgtcccacttgtacagtttgaccttgggcagtaatttctactaggcgatcgcgcaaatttcccatcatttgccgatttaccaacaccccatttacccgtgatcgactgcggatattattgttatttgcggtaatttctcgactaataattattgaattatcatcaattaaatcaatttcttgttcacttaaccaagccgataaaattgcattaatactaaaagtcccttctactaaagcgcgacttgttccagtgcgaatcacacgactagaaattttaccacctaaaatcgcatcaatcgcatctaaaatgattgactttcccgcgccggtttcaccggttaaaacattcaaaccagcaccaaattctagttctaactggtcaatgagggcaaaattttcaattctgagacacagcaacatcaggccacaatctccgtgaaggtaaatgccggatttttagaatacttcttaattttatcccgatccagtcggtaatgtatagatggtgatgctttgagtagtaagtgaagtaactaatgttactaagttaagctgaataggatttacaggattaaaggataaaaataatttaaaatgattttaaataatttaaaatgatttaaaatgatttaaactttacctaatctttatcctctaatcatactgataaatgaaattttagttaatagttaataaaccatctatatctgttggaaaaggacaatcttccgggaattgatgatcatattccttattcatgtttttcactgcatcttgataacattcatcaaccactgttaaataataattacgcaagctgggagaatctctaaaaatccgttttagttcctgttgggtacgactaatagtgacatcccaaccacgatagcattcaggcaaatttacatagcgtcttttgagtaaatgttcaaataaagtagttaatctactttctaattctcttctatctcttccccccaaagcttctatctcctcaattaaattttcccagtctacatgaatataatcttgagattttaatttgctgattgtgttttcaacccacaaagcaaagtccgtttgataaagattttgcactgataatttagtcatagtgttgattttgatgatacaggaattttgtgtgtcaaatctaggatttacaggattatcagataaacaggatcaaattaacattccataaaatcaattataacctgatgccttcaataatggataattaacaatgaaaaattgacaattacctcttccttaaagtcagaagcttgaaaaagcataatttctggctttttaccttaaaaggggaggttttaaacctataattaaacaattatcaattatcaattatcaattatcaattgataaatcctgattctgataactacaaacccaaagtcctacccagaaaacccgcaacatcaaagtaacgagtatcacccacagtctgatattttaacaccgtctttaagccattttctgctggtgcagattctaaaacatgagatttaaaatttacctgatttacaccaccacgtaaagcttcatttaacacccttcccaccagcttaccctgactaggcacttttaaatttaacacttttgccagagttacagccacatctgcattactcactggtgcttcatctacatattgcgttttaaagtctggtccgatggcagtcatgttattaaaagtatccgcacggctaaaacttccgtgcattccctgtccttgttgtaaagtagtatcagctacaaccacaccgcaagctgtgggtacaccacaacccgtatcaaaagaacggaaattaacaactattgaaggtgtaggagtgcgtgattttccttgtaatttgattgcacttaaaggtaatgtaccggggatttttcctaaagtatcattgacaaacaaaccacttacataatcttgtttgaggagagaattaacaattttttgggcgtaatatttttgattttcattgtttggtaaatcaggtaaataaattaaatcagaaccaccattcccagcaataactatctctggattttgcgaatctttacctaaaatactattagtagtattagtagaaaattgtccttgtgtcggttcaactattgaattttcctgatctgggttaaataaagcaagttctaaatcatgtgctaaatcatgtgctaaatcaattcctaaaaacccaggaggtaaaaaaccagcagggacattttcataactgagacttgctgcataactagttttactttctttactaatggtagaaaaaccatgatccgcagtcacaaatatatttgtgttttttgccaaatctaatttttttaaagtagcgataatctgcgctaaattattatctacattgcgttttgcagcttgaacagtagaaccattgataccaggaacaagttgatttaaactatcaccgtgattgtgttgtgttccatctggatcacgtgaccaataaaccaaaacaaaaggtttttttcgttgtttaaatagaggtaaaatcaccttagttgtcgcatctacaaaatattgctgttgtttaatattggcaacttttgcaccgggattttgactatcaccagctttaccattttcaccccgtggtggtgtaattaaaggtagggaattttgggttaataatttgctaatttcctcactcagaggtattcctgttgatgtaccagtagcgtcatcaataataattgtcggtttacccgtttcttgagtgatatcttgaattaaaacaggacctaatttacctaccgcagcagtgctaaaacctgaatttttcgctatcgctaaaagactaatttcatttaagaaattattaccaaattgttggttaacttctctgagaactgcgtcattttctaaaaatggaactatggtatttttcgcgcttttaactggtacattaactttaatattattgctaaaatctcctgtatcacctaaataatgacctgtagcaatcacagaagcattagctgtggtaaaagtaggaaatagagaatgagagttaacaaaattcacaccctgttctttaattgactgtaaagtgggtgtgtccgtagcatttacagtcataggacgtaaaccatcagtcacaaaaataaccgcattgtgtggttgaggtggtttagcaaatacttgaaaaccaataaaaacagcaattaaacaaactaataaaataacccaacgatcaccttgtgtaaaaatcctcattatcttagtgatttttaggacatgaagattttacaacttatagcatcaaataatacttaaatttctgtaaagaatcataagattaaataatattaagatccccgacttctttaagaagttgaggatctgaggaattacgcaagattaaaaattaataataagaaaaaaccgcaaatcacaagtttaaaaaattaacaaacagtttggcgagtcttttctgtattgataggtttaacgaggtaaagcttcaacatataccacacaatattcatcaccaaaggaattttttggaagaacttctcaattacagatttgttactgtttttgagatcaatcaatttctgattattgatcgcacattgttccaaattccagaagaaatagggatgatttgtattgagaatcacaggaaaagccctagctgcggttttgttggtttctgtgatcacttgactattgtatttacggggatgaattcctaaaatttcataaaaattcgcccgttcaaaaactgtcatagtatgggtgacaaacactgttaagaggaaaaaacgcacccataaacgtgctttccaattattccataaatgaggttgagaacgtaacaaagccttgaaaaagtcaccatgtctattctcatcctgacaccagctttcaaacttcctaaataaaggataaaattgaaattctggattttgtgccatgtggcgaaatactaaaatataacgccaataaccaattttctccgataggtaaactgtataaattacccattctggagggaagaaagtataagtccgttttttagtcatgtaactcaagtcaagggataaattaaaatccgccattgacttgtttaaaaaacccgcatgacgggcttcatcccgtgctaaatattcaaatgcttcagagagtaaagggttactgtttttgatacgacgagataattctttaaacagtaaaaaaccggaaaattccgaagtacaagacctttctaaaaagtcaataaaggcaagtcttttttctccctgaatgtgatcccaagactgtttaaattcatcatctctgataaaatgatgacggttataatctgccttgagttcatcaactacagccctgatttcttcttcataaccggaaatatccattttcgccacagcatcaaaatctgtggtataaaatcggggtgttaataatgtttcttgaacaggtgctttgacacctggtttcaacaactcaactgggggagtttccaaagacttaaccatgatactccttttgctattttatccttgtagaattatctaaacataaatagtaatgagtagtcatcagttaaattattgaaagtaatttgtacaaaatcatctgagataatttagcaattacagaaaatttttatggcattttttctatatttaattaggggttgctgagaaagtctttccgtgagggcataggagtcaggagtcaggagtcaggagtcaggagtcaggagtcaggagtcaggaggagatttgaaaatttctttgccatctcttgaaatcccaaaaaatgcacactttttccggtatacccttcaaaacccttgcactaatttctgtgtttatcagcctctaacctttaatatatcaaggttttaggtttattcagcaaaccctaattactcatttttgcttttgcggctagtgatggatacttaccaacttctattaaaaactgtctttcttgaatccgatcatcattgttaaaatctaaaatacgtgctgttacttcaccaatatctgttaatggttgaatcacagcttcctcaagtcgaaaatgatcaccccaaaagtctcgacggggattaaaaaatctcaccagttcaccatttcgccaattaattgaacctaaatctgtacctttttgcaaattacaaaaaacacacgcataacaaagattatcctctgtacttgttccaccgtgtttaacactaataatatggtcaacttgacaaccagatgatctatctactgctgaaataagacagtattcacagatatttccagcacgttccacaactaaccgtcttgtttctaaattaatgtaaggacgagacattttatttatcctctgtattgatatatttataagccttagctttagctaaagtaataatgtgttctagattcaaaaaaatatctaactcccgtttttcttctttggtgagttgattatttttcgctttgtcaattaaatcttctaaacggttttgtgctgtttctgaaaggtggaaattaattagactttcgggagtagtaccagcagcgagaaaatctataaattcgtcgtagactgtaatgattttgacagatgtactcatagttgtattcttttttattattttaactgttatttacaagtatatacataaaattcagtaattattttaaatcccagtaaatttatttgtcaatacaaaaaatagagtaattttactcaataaaatataaaatatcatcaaatcctgaatctcgttatatttaaaagtctaaagaaatatgaatatctttatattaataagaagattgatagttaaatattttgtaagagtaaaaataaccctgatctttagcagcagtggtatttgctggatagattagtggatcaccccataaacccagaatagtcattttttcctgttgacatcgactgtgaactggtaaacgagtcgatgactattgagcaaatttggcgcttgaaaatgaaggaagcaacaatgagtaataatttagccatcaaactgcgttctggtactcaacaagctcatacagatgcagaaaatgtcggttttatgaaatgttttgttcaaggagttgtagacagagaatgctttagtaaatttttgagtaatctgtattttgtttacagtgaactagaaacagcaattgagaagcataaacaacatcctgtaattagtgtaatgtattttcccgaactaaatcgccaagcatctctagaacaagatatgttattttatcatggtaatctctggcggaatttcattacaccatccacagcaactcaaaaatacctggcgcgtattcaccaactttctacccatgaacctgctttattattaggtcatgcctatactcgttatatgggtgatctttccggtggacaaatgctacaaaaagtggctcagtcagctttgaaattgtctggttatgaaggaactgagttttataactttgcccaaattcccgataaacaggcattcaaaaataagtatcggcaagcattggataatgtgcctgttgatgatgtgatggctgataaaattgtagcagaagctaaccatgctttctacttaaatatggagataattaaagagttagaaccaattttaatgcaagcattaggtcgagctacatataacgacctagtttgatattttcactctgtaaattacctgtaaactaacaaaaaccctctcctactcttcttacttcgcgtactttgcgtactttgcgtactttgcggtttattgccaacaatagtattcaccaccaaacaagtttgtgtagtcgtgaatataccccacaaaagcagatcgtattttacagctattttcaggtaaataaaccacattttgatttaggttaaagacatgaaaactgctgtaaatcaaaaccgggtttcttgcagtaagtcctagctatttagtttcactttagtttcattatttgaagctaaacatacaaatgttttggcaattggtaacaaaagataaatatcaacctattgccaatctacaaattcccacccaactcaaacccaactcaaacccaattcaaacccaattcaaacttagtgcaactactaggcattcaattaacagtaactcggaggttttgatggtctttctattacctggtgtcaaattcgatttggacctgatcaaaaagtatgacacccgcgcacccagatacactagctacccacccgctacagaattaactgaaacatttaccgcccaagactttgaaagagccatcattaattctaatcaacgtcaaacgcccctatctttatatttccacattcctttttgccagagtgcttgttatttctgtggctgtaatacggtgatttctggcaataagaatattgccaaaccttatctacaaaatttagcgcaggaaatccaaaataccagcgaattaatagataccaaccgcaaagttttgcaaattcactggggtggtggaacaccaaattatttggaaatgcagcaagttgaatttttgtgggataagattaatcgttatttcactattgatgaaaatgcagaagtttctattgaaattaacccccgttatatcagtagagaatatattctatttctcagaaatattggctttaatcgcattagttttggtatccaagactttaacccagaagtacaaaaagccgttaaccgtatccaaccagaaaaaatgctgtttgaggcaatggattggattagagaggctaatttcgctagtgtaaatgtagatttaatttatggtttaccctaccaaaatctacatacttttagagaaactgtcacaaagacaattgctctagatcctgatcgagttgtggtgtttaattttgcctatgtaccttggatgaaacctgtacaaaaaagaattgatccggctacattacccggcgctcaggaaaagttagatatcctgaaaatgaccattgaagaattaacaaataacgagtatttgtttatcggtatggatcattttgcgaaaactaataatgaattagcgatcgctcaacaaaatggtactctcaaacgcaacttccaaggttatacaactcacgcagaaaccgaactttttggttttggttctacatctattagtatgttagaagatgcctatgctcaaaaccataaaggtttaaaggactattatcaagctgtaacagcaggtattcttcccaccagtaaaggcattaaattaacccaagatgatatcatcagacgggatgtaattatgtctattatgtctcacttccagttacataaatcagacattgaaaagaaatatcacatcaattttgatggatattttgcccaggaactagaagaattaaaacctctggaagatgatggactggtcaatttattagccgacgaaatccaaattaccgatactggtagattattagtgagaaatatcgccgttaactttgatactcatagcagaattaaagaaacaaaattctctcgtgctatttgagtatggtaattagtgattggtgattggtaattggtaattggtaattggtaattggtaattggtgattggtgattggtgattggttaaataccctaattatctaataattggggtatatttttatgtttatggaattaacaggaattaacaggaattaacaattatgatagcttgaatcctttatctacaacttttgatttaaataaatatatcatcaggtagaaaaaattatctttcaatactaataaatttgatacagtataaactatagaggtaatcggcaatgattaatattattgcttggataattttaggactattagctggtgcgcttgccaaagctgtttatcctggtcatcaaggcggtggcattgtctcaacaataattttaggtattgttggtgcttttatcggtggaactttatttacactcctccgcactggtactctacaatttgcgtctgcaactttaagtattcccggtcttttggtgtcaataattggcgcgatacttgcgatttatttatggacgctattccaaagaagtagccgagcataaattcaattttagattttagattttagattttagattttggattttggattttggattttggattcgggattttagattttgggttttgaagttggaaatttgaattaattgtattgtatgttttttcacaaaaaagaaccgattcattttgtcaaagttgatgaacctaacccccgctttgctcaattacttctagagcaatttggcggtgcaactggagaactcacagccgctttgcaatattgggtgcaatcttttcatgtagaaaatcctggtattcgggatatgctccaagatattgccattgaagaatttggtcatttagaaatggttggtaaactcatagaatctcatacaaaaaataccgaccaaaccgaagtttacaacagcactctttttgctattcgcggaataggacctcattttcttgatagtcaaggtcaagcttggactgcaaattacttgaatgaaggtggtgatgtcgtccgcgatttacgggcgaatattgccgcagaagctggcgctaggcaaacttatgaggagttaattaaactggcaacagataaaggaactaaaaatactttagtgcatttgttaacaagagaaatttcgcatacccaaatgtttatgaaagctttggattctttgggtaagttgactgatcctatgtttggtaatgttcaaccagatgaaactgtttctctttattacaacttatctaccaatggaactgagccagatcaacgaggtccttggaactctgaaccagcatttaattatgtcgctaatcctttagaacgtcgagcttaataaatagttggcaaattgtaatttagagcaggagtcaggagtcgtaggggcgaagcattcgggcgactaatgataaatttttgtccaaggctattttcctgtaagggcgaagcattcgggcaaccaattatcaattttatgaaaaggctattttccgaatgcttcgcccctacttcgcccgtacaggaatcaggattcaggataaagacctagtttttctcacctagtcaccagtccccaatcaccagtcacctctcacctctcaactactgactttgctattacccctaactgcaaaccagggggaaaagtcccttcttctttaatccgctttatttccccttcgctaatttgcaaacttaacttttgtgctaaacacttgacagtatctcccctatcaatcacaccagctaccgcacctgcgggagaaagtacggtgatttggggtagctgctcgttttctagtttgttgataacgtctgctaaagaagttgattcgctgacagtgggtattgtgttcagaggatgaacaatagtttgcaaagtttcagtttcccactgacttctttccgtgatccgcaaatcatcaattttcactaaaccccgataacgtccatccgatgcagcaaaataagtatgtgcaatgtgtgatgtatggggaaaagatgtatctaaaagatataaatccgcaaactcccgtaatgttttatttgcgtcaactacgcgaaaatcacgagtcattgcgtcaaccgcttggagtttaatcagagtttcttgcagggtggtaacattgtcataggtattagcgttacgaattgcaaaccaacctaataatacaatccacaaacctgttaccaattcctgggtaaagaaatctagagcaaatccgcaagcgatcgcacaataacctaaaatttgtccagacttagccgcccaatgtactgcttgaaagcgatcgcctgtaattttccacagagctgcttttaatacctgtcccccatccaaaggtaaaccaggaatcaagttaaataaagccacaacgcagttaattcttgctaaatccctgaccataacatttagtaatgtcgtatcaggaatcacttgataacctagagttaacaacacaaacaggataatacttaccgcaggaccagcgatcgccacttgaaaagctttacctggagtttttgactcttcctctatcgctgcaataccaccaaagaaaaacagcgtaatggaattaactttaattccttgggactgcgccaccaaactatgccccaactcatgcaacagcacagaagtaaataacagcagtgccattaccagtcctgcactccaagctgtgacagttccccatccttggtaagcaaccccaaaatttaaagttgccaacccaacaattacaaaccatagggagtccaaaaacagaggaatgccaaataaagatccaatttgccaatttttttgcattacatcaatttatttatatatttcttatatttcccaccatagcagaaggcaggggaactaggagaggtaggggaggctgacaagggtaggtattttacattgtcgtgagggcaagacttgggggacaaggaaggacagtggacaaggggggaaaaccgtacaaaatcatattctcttggtaacaaaaagactattgtgcggataaaatcttccttgtctactttccctccttgtcttcctagtcctgccttaatagataatattaaaaacctacccctgtgagggtaggggaggtagaagttattaattatcaattatcaattatcaattatcaattatcaattatcaattatctaggacttacgcactgtacaaattcaccatgatgtgcatgaacgaaaatccgtcgtttcaggcttttgtcgattaacttccgatcaatagcgaactgcttgcagcagcgcttcgctatcgctcaaaaatcattaaaaaatcacgttaaaaagcctgaaatccatacctcatatttggttgatcctggcgtaagtcctattatcaattatcaattatcaattatcaattagtctccagacataaaaaagcggtaagtaagttaatgtttacctaccgccgaatttttaagttactctctcgtaaaagagcattaaattaaacttataaacgaccgatgttagtcagtcctaaaacaataccaataccaattacatgaccaaaagccattgcaccaataaaacctgctacacttacgggaagtaaaggcatttggggtcctaccttgggcgctttacttgccaaactgagtaaaagtaccaccaaacaactagcactgataataataccaactgtaggactccactcaggtgtagcgggtacggatgctgctgctaataaaatagatgataacaagatgtattctcctacggtgaaaaatgaatccaaacctacaaaattatagaattagctaggacaaagcaaaagtttttcctttaaattaatgtacttttgtaattatttttaatttcccccgtcatttattacacttatctcacacttaaatgcgagttaaaatttgcggaattactcaaccacagcagtctttagctatagctaacttaggtgcaaccgcactaggttttatctgtgtaccaacttcaccacgctacgttaccatagaacagatacaagcagcagtagtaccactaccagatcatcttgataaaattggcgtttttgccaacagcagcattttacaaattagtgaaactgtacaaacatctaacttaactggtgtacagttacacggagatgaaacaccagaattttgtgatcaattacgtcagattttaccaaacatagaaattattaaagccttgcgagtgagaaatttacaacaattagaaaccacaactaactatattgactatgtagatactttactattagatgcttaccatccccaacaattaggaggaacaggaaaaacattagattgggaaatgttacaagcttataaacctagtcgtccttggtttttagcaggaggactaacaccagataatatattaacagctttaaatcaaattcatcccaatggaattgacttatctagtggtgtagaacgttcaccaggagataaagatttagataaagtagagttattatttgctaggttaaaatccgtagatatttgaatcaagatttttaggatgtgattcaatgttgatttttttgtctgaatcaggatgtccaggatttaaggatttacaggatgtaagaaaaattaaaaattaaaaattaaaaattaaaaattaaaaattaaaaattaaaaatccgcgtttatccgcgttcatctgcgttcaaattttgtcataatcaggatatccaggatttaaggatagattacatcaggttttatgctagttgttttttgtgtttgatttgttgtatattgagaataggcgatcgctcaaatcttgaggtagtgataaaatagaaaaatcaggacaaaaatcaggacgaaaataaagataacggtgtttaatttttagcttaggagttaatgatggaaacaattactattaatgttgagcatgaagtagcgaaagcttatcgagaagcagaagttaacaaacaacaaaaactcagtctcatagttaaattattctttcaacctgattttgctaataaaactttgagtcaagtgatggaagaaattgctgataaagctgaaaagagaggtttaacaccagagatattacaagcaattctagatgatgaagatgaataatgataaataagcgttttgtcttagataataatattttagttagtgcattactaattatccattgttgaattatatgatgtttattattttatttgtctgaatcaggatttacaggatttgaggatgtacaggatgttatttactaattatccattgttgaatgatatgatgtttattattttatttgtctgaatcaggataaccaggatttgaggatgtacgggatgttatttactaattatccattgttgaataatattatgtttatcatcttctgaattgagatgatcaaaatcattttacattctatcctgtcaatccttaaatcctggacatcctgattcagacaaaattaaacatcctgtcaatccttaaatcctggacatcctgattcagacaaacgcttcccttaacactgtttgcatcagttcttccgctagttgtttccggtgttttatttgtgcttctagttcctctatttgtttcattaaataatctactttttctactattgctttttgttctgcaagaggaggaagggggaaaataaaacttcttaatttagtagcattaatattagattgtcctattgcatcactctttactgtattacaccattctctatgcagttgagagttcataacataattagtatagtaaaaatttatttttccaatcatcctataacgcactaaataacctgcataaattgtttttttattataaagaaataaagatgttttccctactaattctctgctgttagttctattaaaaagtaaatcaccataggataatttatattgttctatttcttcttcattatctgtatatactaaatctgttaaatcaataactccattttgtaaatttcccattcttaaaactgggacttttccaattttaagtgatttagaacttgttccatattcaaatccttcagcaatgtctactaaacgacaccaaacccaaccatcaggtaaagaaaagggaacttcatcactagaaataggaggtaaaggtttttcttttttcagtttaccctcagtaattaattgttgtttttccgccttgattttatccagaagtgcaacagcatccgtatcaggattacctttttgcatcgggttttgtttacgccattctgctgttaatttaccagatatcgcttcttgtaaaatcgcttgttttagttgggtgatgtatttttcttggttatttaattcattattcaaactattgattaattgagatttatggttatttaacaataaaatttctgattgttcatcaagggaaggaataaatagctcatgattaagaaaaatttgttcatttaaatatcttctatgagtaataccactacttgctctttcacaaagatcatagaacgcaggggaatttgtatattgattgatccattctgcggttgttaaagaatgattaatgtcataagcccaaaaattacctgttattattgcaccatcaacatcatctccagcaattccaaaagctccatatctagcatcaattttagacattacaaattgtccagacttgaggataaattgtttttttgttccaatttttttaccaatttccttatctcttacataaactccttggtgtttacttcttatcgttatacgcttgtattctttgtgttcttctatgtcaattggtatttttgagcgaattaggagatcaccaattttcaatttttgccatttactcattaaaaataccttcctttaataaatccaaaattatatcactttcctttaaagaatcatgcaacatccccaacaactccaccgaagtataacccctctccacctcctgaacatggggatttttcacatccaaattaaaaccattcttctccaactcctcaaaacttacccgccatgcttgatcattttcctctcttttatcccaccatttctttaaatcattaaactcatttttatgaatcggtttcgtcttagaatacgccttcacaccctccggtaattgatgttcccaataccaaacttccttagtcggttcacccttactaaaaaacaacaaattagtcgccaccgaagcataaggttgaaacacagaattaggtaaacggacaatagtatgcaaattacaagactctaataaatgctgacgaatacgcgcctttaccccatcccccgttaacgaaccatcaggtaaaataataccagcccgtcccccatcatgtaaatacctaaccattaataataaaaacaaatctgcactttccgtagtgcgataattcataggaaaattatcctctaccccatcagtaaccgaagcaccaaaaggagggttagctaaaatcacatctacccgatctttatgattaatagaagtatattcacgatttaaactatctgtatattcaatattcggaacttcaatttcatgtaaaaataaatttgtcaccgctaacataaagggtaaaggtttaaattccatccccttaatcgttttttctaaagtttgcaaatcgcgcacattatcaacaccttgcagacgtaaatgattaattgcacaagttaaaaaaccacccgtaccacaagcaggatcgagaacaatttcccctaacatcgggttaaccatttccgtcatcaattcagttaaagcgcggggtgtgtaaaattccccataagcgcccgcagtttgtaattcccgcaaaatcgtttcataaatatcaccgaacaaatgacgatcttccgaactttcaaaatcaatttcattgagactatttaacacctgacggataatagtcccatttttcatataattattagtaccttgaaaaatctctttaataattactgcgcgtttattccccgtgctagtatctaaattttgcagtgtgggaaataattctttatcaataaaatcccgtaactcatcacctgttaaagactttttcccattagtcattccctgttcagaaaccgcccaattacaccagcgtaaatgttcaggaataggggaaacaaaatcatctttaattaattccaactcctgatcacttgcatctaaaatcttgagaaacagtaaccaacctaactgttcaattctttgtccatcaccagaaacacctggatctttccgcatgaaattacgtaaacttttaatactaccgccgagatttttcattgtgaattatgggaaaggtaaataaaaatgtataatgtaagagaataacataaaatagttacattttgtcagaatcaggatagccaggatttaaggatttacaggatgtaagagaaattaaaaattaaaacttaaaaattaaaatccgcgtttatccgcgtttatccgcgttaatctgcgttcaacttttattcaatcactaatcaagctgctattttatataactcagaagttaaatctcgtaaagcagaaatatattgagacttaccaccaaaaattttcacaatttctgaaggagaaccaaattgttttaaaggtgctaatttcagtacagacaaatcctcaatattttcaattctggatatttttgaaatttatcctagtaaccgttttaatcttttataaacatcatcatcattacgtttacctactaaaattacttcaactaaatcttgatctggaaaatatctataaacaattcgatattcaccactatctactcgataaaaaccctgataaccagatagttgttcactatcatttggtaaaggttcaacatttaaggataaaaccttttttgctatttgtgccgctattttaggttgtaatccgttcaaaaaatctaaaacatttgataaaccatcaagtttcaccattagctaaaatctccagcgcagatgtaaaaacctccgtaccaaccatttccgattcactaatagcagttttagctttttctagcaaaatttgatcttctaattcttgtattcgattgatcatcttttcatataattctgcggaaaaaatcacataactaggttgtgattcttgaataagtaatactggttcaatagctgcttgatcaaaaatttcaccatgtttatcgggagcatctataagattataagtttgcatagtttccatagtttccatagtttccatagtttaaacatttccacaccattataacacaaatgttaatcaaggttaatcaaggttaatcaagctgctattttatataactcagaagttaactctcgtaaagcagaaatatattgagacttaccaccaaaaatgttcacaatttctggaggagaaccaaatttttttaaaggtgctaatttcagtacagataaatcctcaatattttcaattccctcattcgcgtatttttccaaaagtgcatttaaaacgtccctggctttttcaccatatttagtaaaataatctcgttttttcacattttccgctctttgcttacgagttaaaggtggacgattccaagcaacataacaaattaaatcaaacaaatctaaatctttcttaatttcctgttctaactcctcagcaataatatcatgatttcgtaattcagcaatcaaagcagcttttttatcagcttcattccagcgtgttaaaaactcatctaaactgctaaatttttgcaatacattttgtttagtataatcccgtaaactactagtaactaactctcctgcttcattcaaatattgtactctttcattcagaacagcaatagaaacccctgtaatataaatcttatcacgtttctcagaaacaatattaccaccttgaataattttcggttttttgtcagtaaaattttcagcacttgcactaaaatcaatcacttccccagtatcttgatcaataatagcttccgttaaattgccattaatatcttctatagttaacggttgatttgtaccgagttctttaatcataactggatgatgattaaaattcggatcagcaaattgatcggtaacatttctaaaatccatgattgtaaaaaactgcttattaaattgttcattgattctcgtacctctaccaataatctgcttaaattccgtaggggattcaatattagtatcaagaacaattaatttacaagtttgtgcatcaactccagtcgtcattaacttagaagttgttgcaatcacgggataacgttcttcgggattaataaaattatcaagttcccgttttccttccttatcttctccagtaatacgcatcacatatttatgattttttaaagctaaattacccgcttcattgataatagcttgacgcattctttccgcgtgttctgtatctgtacagaaaataattgtctttccataaacatcggttttccttaaatattccatcacccttttagcaacggtttttgttctttcatcaattactaaatgtctatcaaaatctttaagattataaattctatcttccacaaaataacctgatttatctcgttttcccatttcaggacgataaccttctaaatccacatttaaacccacccgaatcactttataaggtgcaagaaaaccatcatcaattccctgtttcagcgaataagtataaatcggttcgccgaaatattcagtattagaaatttcctttgtttccttgggagttgcagttaaaccgatttgggtagcaccactaaaatattctaaaatttctcgccatttactatcatcagcagcactaccccgatgacattcatcaactataattaaatcaaaaaattctggattgaattgtttataagcatccaaaatatcatcatcataattaaccaaaccttgatataatgctagatagatttcaaaagcatcatcaatagttttgtttttaatcaccgtcattttatctttaaaatgtctaaaatcaccgcgttttgtttgactaattaaagcatgacgatccgctaaaaataagactctttgcttaataccatttttccacaaccgataaataatttgaaaagcagtgtaagttttccctgcaccagtggccatgactaaaagtaaccgattttgacctttagcaattgcttctactgtacgattaatagcaatttgttgataatatcttggttgacgaccttgaggatcaaaaaagtaatcaaaactagctattttttccgcttctggggtttcaattcctctatattttttatatttctgccaaagttgctcaggagtggggaaattatcaagacttaattcttgttcaattaaattagcaaaacccgatctatcatgttctaaaaaaccatcaccattggaactaaaagctacaggtaaatctaatatttctgcataatttaaagcttgttgcattccagcaccaacagggtaaatattttttttagcttcaattacagcaatagcaatattcggtttatagtaaagaatataatcagctttttttccttttccccgttttgcctgattacctttaacataaattcgaccatcggtaaaatatacctgttctcgcacttgtttggtaatatcccaaccagcacgaaccaaggcaggtaaaatatactttgtacaaatatcttgttctgaaagttctcgtttatcagtcatctgtacaatcacttatataattagggtttattatatcattatataacaggtgactggggactggggactgg

SEQ ID NO: 49 - DNA, 40796 bp, Sphaerospermopsis sp. LEGE 00249
  LEGE00249_64
attttttctgtcactcgtttactgtgatcaaggagttatttgaactatcaatcaactgtcaaatatttgacttccctaaacttcatgactacggtgttttctcatgattgatttagggttgctatatgtgttcttaattgttcagtgttaacgccagagacagtattacaaataattgattttaatagacactcaatggtaattccaccaaagtgcatagttcctatttttcgcaaaggctttagtgtttcagtatcagtatggcgttctaaaaaagctgcctgataatcttccatacttaataattaaaatcaaaatttaagcctaatcagtatattacaagatcaggattgtctgataaattgatttgtttatttttattctcctccccctttgtatttgttgctttaagttgggaaacccgccaacggatctccccaaatcactggcttctctgcacctctgtagtgagataaaaaacataccttcatacacaactgtacacaattgtaaatttatattgctaaaaaaaacgcattacatcatgatgtaatgactgctgataagatgagacaaaatcaccaacaaatcataagatgatgtcagaacctatatatttcttataaatcaatgagtaaaaaacttaacgcagtaattcctgatgaaacctggcaagcattagaagaaattgccaaaaaagaacaaagaactaaaagccaaatggctgcgattttactaggggaagcattggccaaccgtcaacaacaaccgcagaaaacatcatgaccacagaacaacatctccaagaattaaccgtcaaacaagaacgcacccaaacccagttagatcaactatcaagccgagttgatgagtttgtctttcatgctcaacgcttatttaacaaaatgggtgaagatgtagaaatcacaaaagcacgtactgacagactagaagcactgatgctgaaaatggatcgaaactatgaaacccaacaatcacaactgcaagaatttcaaaaacaaacccaggaatttcaaagacaaactcaagaatttcaaagacaaactcaagaatttcaacgcacaacaggcgctgctctagaacgtatagatagagtcttagactacctcctaagacaaagcggacagaattaacctctctctgcgtcctctgcgcctctgcgtgacataaaaaaatagccgctccccaacagaagcggccatcatttaatttgttaacaaaagaccttagtaatcgaagtctccgccacccataccagcaccagcagcaggagcagcatctttaggttctggtttgtcaacaatgatacattcggttgtcaacaccataccagcgatagaagcagcgttttgcaaagcagaacgagttaccttagcgggatcaacaataccagcctccaacatatcaacaaattcgttggtagaagcgttgaaaccaatgttgaaatctttttctttcactctttcagctattacagcaccgttttgaccagcgttttctgcaattctcttcagaggagcaggtaaagcacgaacgacgattaaagcaccagtcaactcttcatttttgaggttgctgttagcccaggtttccaactgaggagcgaggtgagctaaggttgtaccaccaccaggaacgataccttcttctacagcagctttggttgcgttgatagcatcttccaaacgcagcttcttgtctttcatttcggtttcggtagctgcaccaactttcacaacagctacaccaccggataatttagccaaacgctcttgcagtttttccttgtcgtaggaagattcggtttcatccatctgacgacggatttgttcgcaacgagctttaacaccagcttcgttaccttcagccacaatggtggtgctgtctttggtgatggtgatgcggcgagctttacctaagccatctagcttggtgctttctaacttcagaccagcatcttcagtgatgacttgaccaccagtgagaactgcgatatcttctaacatcgctttccggcgatcgccaaaaccaggagcttttacagcagctacgttcagcacaccacgtaaacggttaacaaccaaagtagctaaagcttctttttcaatatcttcagcgataataaccaggggcttaccttgacgtgcaacttgctcaagtacaggtactaaatcttgtaccaaagcaattttcttatcggtgagcaggatgtaaggatcatcaaaaatcgcttccatccgttctgcatcggtagcgaagtaaggggaaatataacccttatcaaaacgcataccttcggtaatttccaattcggtggtcatggactttccttcttccaaggaaattacaccttctttacccaccttatccatagcttgggcgatcatgctgccgacttcatcatcgttaccagcagagatagcaccaacttgagcgatcgccttagaatcttctacaggacgagcgtgttcagcaattctttctactaaaaacgcagtagctttatcaataccgcgtttcaacagaattgcgttagcgccagcagctacgttccgtaaaccttctttaacaattgcatgagccaaaacggtagcggtggttgtaccatcaccagcagcgtcattggtcttagaagcagcttggcgaatcaaagaaacgccagtattttcaatatggtcttctaattcaatttctttagcgatggtaacaccatcattgacgatttgtggtgcgccaaatttcttctctaaaactacattacgacctttgggtccaagggtgacagcaacagcttcagccagaatatcaataccacgctcaagggcgcgacgggcgttttcgttgtaaataatgcgctttgccataatctgtgtaattctggtgtgtaattctggaattggttatttgttggttgtcaattttctgttttcagttctgaagtggggtgtgattttatatcaatccaaaatccaaaatccaaaatccaaaatctaaaatctaaaatctaaaattcaaattttgacttttgacttttgacttttgaattgtttgacccctcatcactcaattagctgactactgctagaatgtctttctcagaaagtagtacatattcatcagtgccgagcttcacgtctgtaccagcgtacttggagtacagcactttatcaccgactttaatttccaattcttgacggctaccgtcatcattccgcttgcctggtccaagggctaccacttcacctacttggggtttttccttagcggtgtcgggcaaatatagaccacctgcggtcttttcttcagcggcggtcacttttacaaaaacgcgatcgcctaaaggtttaactgtagatacgcttagagatacggctgccataaattttttctccagagttagcactctcaactcctgagtgctaatctaccgaaaaacagcaacaaatggcaacaatcttttctgtacgggtttccgaactggggactggtgactggggactggtgactggggactggtgactggggactggtgactggtgactggtgactgggtaatcaattttatgtttcccaatcaactgtcaactatcaactgtcaactatcaccaatcaccaatcaccaatcacagagcataaatacctaattgttttagttgtcgggttctgttgcgtaggtagtgaatatttttatatggacaactttatttccaaacctgggaaattgttatagaactgtaaacagggagccgctgaatgagtaacaatacagtgagtcaacaccgccatccaaacagtcatccaatccccagaactactaaagctgtggaacttcaagccctaagtaatatgtggacgcgctaagattggctttcttttctctccacaggtttctgctggttcttaccaaacagatactccgggctaaaaacctcctagctatgtcatctgggaatgctggaaactgtgactcaaagtgtggacatctcaaccatcgtgtgagattcttcctatttgcatcttctaaacctcaaccaaccgcttgcgtatttgttgttctagatagataatggaagtttacccagatgcggtttggtattacacaaattaattgatttatagtcatatataggctataacaggcataaataaaacatttttacgccttcatagtcaatgatataaatcaatagttttggggaaattccagaaaatgacaccctagctctggtaagacacttagcacaagtccaagcctttttttatttcactgtcaaaattaattgagggagataatcaaacaattaggcaggtgatgtaaattaagtagtcccgacagctattaaccaagggatagagggtatgtagttcaccctgtgaagttttacctcacaaaataaaacctgagatatttgtcaatggttttatgaactatattcaaaaaaccggaagttattgagcggatgatcccaaaacacttaattggcatctatggaaatgtaagcataagcctttttcaaccatttttttgccaggagcttccttagtttcttgtgaacctctagaggcttaacattcaaaacaggatatagcagagcaacagttaacaaatgaaagtgcgggtgagttgtcagttagggtgatcttcagctaaatactgaacctgtcaaccagacggattatgatttaatcaggttttttagcccgctgctttcaaaagagtatataatagtgcattataaatactattgctctccgtatccttactagacttttgccattaagttactagtagtatgttaagagtgcctaccactttcacaaccacaaacaaccaaggcaagttaagtggtaaaaacagtacgtgcggccagcgcggaatttacgcctgtggacaagaacccggcgacgggcttggtggaagcaggaagcaaacaacaaaatgttccaggttctagggtgtatttgcttatgcccctgccatgaacaatttttgtcaggtttgttttgcacaacatctcacataatccaccaaagaggataactattcaagaccttgatggattgaagcgcgacaagtgccactgctatgaaagagtccagcatgaaagatcacaaacgacttctattaattgatgatgaccctaacctcatcttgctggtgaaggattacttagaattccggggctacgaagtcatcacggccgaaaatggacggcaagctctggaaatattagaccatgatgttccagacatgatcatctgtgacgtgatgatgccagaaatggacgggtacacttttgtggaacaagtccggcaaactgaacgcactagctggatacctgttctcttcctgtccgctaaggggcaaagtgcagaccgagttaaaggtctgaataaaggtgctgacgtatatatggtcaagccctttgaagcagaagaactcgtagcacaagtagaatcttcactcaagcaaactatccgttggaaagaacatcaaactaagggaggggaaaacggttctcgtatccaggttccctttgatgtccagttaactcccacagaactgaaagtggttcagtttgtggctaggggtttagctaaccgggaaatcgctgaagaactaaatgttagtcagcgtacagttgaaagccatgtttccaatatgttgggcaaaaccaatctccacaaccgtactgaactagcacggtgggcgattgaaaatcaaatggcttaaatgttccactgatttggtgaaggtttgagttttgagttaaaaaatcataactcaaagctcaaatcctttatttgatcttgactttagtttgatagccagtaaaaaacatgacatgaattgtgaagcatacagatttttcaattccaacttcataattcatgttttatgatactttcctcaattgctatcttccaacccagatatcacctaaaattatttatacaggctaattatagggactggtgattggtgattggtgattggtgacgggtaaaaatcttttattcctctacttcccttacttcccttacttcccttacttcccttacttcccttacttcccttacttcccttacttcccttacttcccctacttcccctacttccgctaccttctgccttttgcctcctcccttctgcttcctgttccctgattaagtaatctgttccgtagggatttctatgataaattctgtaccataactagggtcagaacaaacataaatattgccttggtgcttttcgatgatttgatagctaattgccagtcctataccagttcccttgttgacaggtttggttgtaaaaaatggatcaaatatcttgctttgtaattctaaactaatgcctggtccattatcttggatgctaattgtgatcttaccagaatcagtttttttggttttaattactatttgtttttgttttttttgttcttgttctaataaagcatcaatggcattactgaggacattcataaatacttggttgagttgggctggataacattcaactaatggtaagtctccatattccttaatcacctcaatttcttgttttagcctatggtttaaaatcagtagtgtactgtcaattccttcatgaatatcgacggcttttttatcagcttggtctagtctagaaaagttgcgtaaagattggacaatttcccgaatacgatctgttcccattttcattgaggcaagtattttgggtaaatcctcgatgataaaatcaagattaacctcaactgtgtaattttcaatgacagaattttttgctggatattcgttttgataaattttaattaactctaacaaagcttgaatgtaattttgcagatgaatgaaattaccattaataaaattaataggattattaatttcatgagctaaaccagctaccattttacccaaactagacattttttcagtttggataagttgaacttgtgtttttttcagttcttttaaagtctcttctagttgtcgtgcttgtagacgagaagtggcatttgctgttgagagtgctttgaagttgttataggctttagaatgataacggatgcgggcaattaactccactacatcgggcaatttaattaaatagtcattagcaccagcagcaaaagcatctgctttagtttgtggatcttctttgctggagagcatgacaataggaatattataggttgctggatgggagcgaaaccaacgtaatagcattagtccatcaatctcaggcataatcatgtctaagataatgactgtaggctcaagggaaatagctttttgaatagcctgtgcggggttgtctatataataaaaagcgatattttgctcgttagctagtaatttgccaactgcttcaccgattattggttgatcatcaattagtaaaactttaactacatccgtatttaacgggacttttgatggagtatatgacagttttttttcctgattcaacgagggagataatgtctcagcagttggtgaggtgagggctgtagatgtggatatcattgttatcgctcctcataattatggtgtggaaaaaattttaagtgtacattatttacccttaaactcaggataacttaaattaataataaataaagctttgctttgcaattcgtaaacaaaatcatactgttgactttccttagtcagctaatttattttgaatttttttttacgtaattactggtaagtaggtagatttgaataatggataattaacatggataattaacaatgaacaattgacaattacctctgcggtgaaagttagaagcttgaaaaagcggaaattttggttttttccctggaaagggtaggttttaaaccttgaatgaaaaaattgtcaattgtcaactgtcaattatcaatgttattgccctctgattaaaaattttgtacaggctggtgcgatcgcctcaactggtaaaatttgtaacgctgcgcctaattctactgcggctttgggcatcccataaacgacacaggttttgctatcttgggcgatagtgtgccaaccgatatcccgtaatatttttaacccttgagcgccatcccgacccatacctgtaagcaatattcccacaccgttaccttgccaatatttagcaacactttgaaaaaagacatcaacggaaggatggtagaaactatttatgggttcttcctgatagtcaagagtttgatctgcacgcattacgaggtgatgatttgtacctgcaactaatactttacctggttttggtaaataaccggagatagcaagatggactggtaaagaaatttgtccatttaaccaagtagcgaaaccttgagcaaattgggcatcgagatgttggacaatgacgatagaggcgtttaaattttgaggaaactgggagagaatagtaactaaagcttggggaccaccagtggaagaaccgatgactatgagaggtggttgtggttttggggaagttgtgggtttgagtcgtggatcaaactgcgatcgcccacgggaagacttaccgattaatctagcaatagtggatattttctttaataatctaatgctactatctgtaggctcacctaaactaatagctggggtattgacagcatctaaagccccataacccattgcttcaaatactttagctgcataacggttgacgctggctgtcaccatgaggatagcacagggggattgactcataatgtgttttgtcgcttccaccccgtccatgttgggcatgacgacatccattaaaattaaatctggggtatcttctgcacacttagcaacagcttctacaccatcataagcaatccaaactaaatcatattctggcactgttgctaaaatccgtcgtagtgcttccactgcgatgattaaatcgttaacaatagcaattctcataaaaaagttgtatttaatttgtaagctaactcatgaaaacatagatacaatagctaatctattgtacaattaattatgtaaatcgctgataaaatatgcaagcttttctaactattacgattactccagaattgaaagcagcacttttagaacttactcaaactgaatgtatatctattgatagtttagttgttaaagctattgagagctacattttgactcacagattccgcgcattgcgttcttatttgatgcccaatcagggaacagtctatacagatgaggaaatttttgagataatttcatgaagctagttatcaattgataattgataattgacaattgtttcattcaaggttgaaaacctcccctttcaaggggaaagaaatcaaaaaatttcgctttttcaatcctctccgtggaagggagaggaattgtcaattgttcattgttaattgtccattattgaaagatatccattgctgttaatttaacataaaaccgatatcccgactgggaatgaattaagagtctcatagcaaaagtcatctaaagatgactaaataaccaaaaaaattttaacttttatcccagaagattgttttatggaaagaataaattactcacaaattattcaagatattttaagtaatcattctcgtaatgatatcgctaatggtacagaaattcaattgctatttgatacacaacgtcatcattatcaagtattaaatattggttggaagcaacaaattagaacttatggggtgattattcatgttgatattaaagatgataaaatctggatacaaagagatggtagagaaattggtattgctaatgaattaatcgctgctagtgtacctaaagaagatattgttttaggatttcacgcaccttataagcggcagtttacaggtttttcggtgggataatacggtgggataataatttatttccattttttaccattacataacaggtttggtttattctttatcaataatcagactaacaccacagcgaatcgctgcttctgctaaccgattatcaagtgttgctaatggtaatttcaaccgcaatgctaattctaaataagctgcatcataagcggataaaccttcttgtcttgctaatttcaaggttgcatctaaagcatttgtatctgtagctatatcaacttgaattaatagggactgtaataaattaatagcttcctgagattgttcttttgtcatgcggttacgtcgttctgctacaacaaaagtattagcaatctccagcgaccaaattcctggtacaaatgcctcagaatctaccatcattgctaatatggaattagcataatcattattttcgtctaccaaacaccagctaattgctaccgaacaatctaaaacaaactgcattaaaatcttcgtccttcttcaatcatttcacggattaggtttttatctaaacctacttcttttcttagttgttgcattctattaattgcgtcttgaattgatttttgagtagtggcttttccccaagcattatgtttaattgtggtagtttctgtattatctaatggttggacaactaccaatacttctacagatttatctttaaattctgtatgggtttggatttgtaatataccatcagcacctatatgtgtcagcaattttattgtttccatttttactaccatttttaagtacaggttgacaatttctgtatttattcatatctatattactacttaaattaaaacttcaacttcctgagcgatacttgtaggctgaggaattggtaaacctgactctattaaaccttctatatgaaattctatggactctacaattagttgttgaacttctgctaatgtttcagctacagctatacaaccaggtaagtcgggaacataagcaccataactggtatttcctttttcaattactactgtataacgcattattctttctccaatttcatacttcctattttactcctcatcatcatggaaattagaaatataaggtggaagtttcccaaaactaattctttctacatatttaatggcgcgatgttcttccaatgatgtttgaattaaggtatttattaacaaccgaaatttattaatatctgcttgagatggtgattttaattgtgcagctaataaactggaaatttgcaaaatcaatttaatattaggtaagttagctttggtttgttcaatgatttgatattttttattcagacaatattcatcacctatatgagaataatcagcgagtgtttttaatagttctggtttccaattaataattacttgttttattcctgggattttatttaataaaacagcgatgattttcggtaaattaggaatgaaatcaccgatatttctaaatctatagataggagtatcaagaattaattctattgtgctaactggtggtgcgccaaatgtataagtttctaatgtataaggtgcaattggttttaattcggtttcactaattcgtttagtaattaatgtagccgcagcaccgcctaaactatgtccagtgacgaaaatatttttgttggcgttttcttctctttggataaagtcttgtaattgttgccaaaaactcttaacataaagattaaaaccggaatgaattgcttctgaattggggaatgcaagtaagttaaagaagtaatcatctaatctttctgtacctctaatcgcaatgacaatatcattttctgttgatagaagtaaaccacaacaaactaattcatcggtatcagttaaaggacgtggtgctgagataaattctatggtttgatatggtggaaaaaatgatggagtacctgtttttaggatatcgctaactatatcatttccttgtttataggcgacgtaagcgagttgagaaatacaagccatttctagggtgcgttgtctgtcggtggatgttttcatgttggttaatttttgggtaggtttgaatttgtaattacagagttgtagatttattgatgatggtttttaattctttctgcacttgttcaagttcttggcgtttttggttaataaatgctttttcaatttcccgttgttctaaattttcctggtgagctttttcttgttgttctaaaatgttttcatagattgatattgcttctgtaattactctactggctgattcaaagcgattcttaaaaactgtgttaataatttcttgggttgtttgataaactttatcttttgattcttcacagaattttttcattcctattttacaaattgttgttttgattttggtatgtatcccatctatatctagcatacccaagccaagtgaaccagcaattgcagcaccaacagcaaaaacagcaatagcaacaaatccaattcctgtaaagaatattaatgcagcagctaaagcaccacctattcccaaacccccacttattcctccaaaacccataaagtcatcatttacacctgcaatcgaaatattaatctgcttgctaaaattggttttaatttgttgatctagcctcttaaaatcacttttaactttatctagttcataagttatataagcatttagagattcaagatgcttgtgtagtatttcttcttttaattcctgatttccccatacatctatatctctcattaattcattcgtgaattgagtagtataatacttaataagtttgtcctgactaaatactgggctatgtttagaagaccaatgcttgcttttttgaagtatgcggttttctaatcctttattccattcttcccaagatttctgagcttgttcaataactaattcttttcttttttctactaaattataaattgtgacatcacaaccactagcttcacctattttttctaaaatttcctgttttcctatttctgaaagtttgatttttccgtctaatgattcctcgacaatatacaaactgtctaaacatttggtaattacttgggttatatcattaactgcacgattaatttttaatgttccacgctctaaagtcaagaatttctctagagattgagtaaacatttggaaagattgtaaatattcatcattatttccattttgaattgattttaatgctgttttagcagaaatataatgtacacgattgatttctttgaaaacaagtaaattttcttttttgacaaaactttcaagtctctgttttacatcttgaacatcttcttgagtatcaaggttatccatgaaatttactaacacaaaaagattatcagcaggttcttttatataactattattaagctgatatcttacatcatgcagtaattctttttctttttcaggaagtagacgggtagcattagttaagaaaatggctgcatctgtatctgttagtattttttgagtaatagctgttctttgaggatgttcatttaatccaggtgaatctactatttctacaccatttttgcataatgctaattcaggatgttcaaaaataatttcctcaatattagattgtgctaattcatcactacgatgttctagagcagcttctttagaaattgtagcttttactttatactcttcaaaagcaatttcttcacttctcccatctttatagcgacaaattacccgtttttgagttccatattttaaaactgtaactgcaccactacaaggaattgctctcacaggctgaatttcttcacctaataaagcatttaataatgttgatttaccttggctaaattcaccaataacagctaacctaaatctctgatttttgattttattatatacttctgtaatatcatctatcaaagtagaaggtaagaaactatgatctttacattcgtgaattatttcagagactaagttacaacaactatctaaattttgacgatagacttggaactttttcaactcatcataggatacacttgtatgcttttgagtggttttaatttctggtttagcaggtaagattgccaacatatcacttgctgcttttacaaagactgtatcaagttcttgaaaccgagaaggatctagtaaaaaatgtacttcatttaaagcatttgcatcaaattttccttgatgagtaaatgcaatctcaaaaacttctaaatattcagatttaacacctaaatttttagcaactattcctaaatattgcttttctttgatgtctatatcacgaacttctaaatattcagattcaacacctaaatttttagcaactattcctaagtattgcttttcccgcacatcaatttcaccatctgcgactgacatttcataaccaaaggcaattaataatattttttctgattctgaaagtggcaatgttaaccttaacaaatcctgaatttttttataagtttgattttctttaactcctttaatcatcaagtttgttaatttctgtacatcactatttgattgactaaatcgagataaaattgtctgtaaacgttgtttttctgcttctgatactgtcccatctacaagcattactcctagtagtaccgtcactaaactagctaaaaataatacctgtggtgtaatatcccgttggctcagtttttgccctgtgatccgtgataataaatcaacagtctcagaagtaactcgtgaagtatccataaaaatcaccagtggatagagtgtgtaaaaactattatttcctaatttaatcaaatttaacttatttaccgagtaattacggttatttgtcttgaaactaataagttatactataaaagtatatattgattcaataaactgggtaaagatatgatgtatcaatttccatctctcattcaagctggtattgaagctggtaaatatatccccgtctttagtaatggtgtacccctaagcatcgctagagatgctgttacaggtcaatttgtgtctcatgctattggtgttgtcaatccattatcaccattggtagctgctcctaattttatcatgactgggttgcagatgtataaaaatcagcaaaactttacagcaattatgggtagcttgcaaacaatccaaaacagcataggagtattacaagcaacaaccgcccttatcggtgtaggaacagttgcaggtgtagcattaacagcagtgaacttacaccaaaccctgaaattgcggaaagaagttgaggaaatgcggttagaggtcaaaaatggctttattgacttgaaacaagccttaaaagaccaaggagcagaaattagacaattaattgaacaggtagcccaagatatcaaatttgaacaacatcgcacggttttaattagagcctatggtttatttgtgcaagctataaaccgtttacgttctgctatgcaattacaagatattggccgcagaaatgcagaaattgacgctgctagaggtatgttatttgaggctttagcagattatactaatcctcatttattagcagaaacttccgcaccaggacaactgcgccggttagaatgttcttgggctattgaacaagcaattattactacttatcaagtgcaaaatgaaatttctgctgtgagcgatcgcctattacaattacaagatacaatctataaaaatgccatcaatgtaattgaaaaatgtgaatcacacgatgaacttgattttctgtttcctgaacttacccgcattcacaatcatgatttagtaatcatcgaagcatggcaaaatcatgtagattgggtaaaatctctacctccagccgaattaaaacttttaaatagtgcagattttcataattcagaaactacccaaactatcactaattcagaaattcccccagaacaaatcagctatgaaaacatagctgaaaaatctcatttttattctttacgggatcaattattatttatgtttgcgccggaattacgccgggaatatgaaaattatgtgagtcaacaagctgcaatttctggatatagaacattagttacatctaatttacaacaagcatcagatttaacagttgctaatcttttttactattttaatattagggatgaatcacaggaagaagtagaataaccatcaatcgttcaaaattcagtgcctcaacaaatgattacagctaataatagtaatttaaatgaaaaagtatttagaaaattgaaaagaattatttgcgagcaattaaatgttgatgaaaacaaaattgacttgaatacaaactttgctgaagatttaggtgctgattctcttgatgctgtggaattagtgatggctatagaagaagagtttgatattgaaatacctgatcaagttgctgaaagaattactacagttaaacaggctgtagattatataattgaaaaagctacttcttaattatttttcccactaactaaggtagaatataacagaagaaagcaatgatgaaaactcaagtttattttctctttagctatatgctatactaataatatatcaacatggaaaaccattatgattacaacacctctctctagtcttagtctggaagaattacaaaccttaattatttcaattgtagatgacagacttaccaaaaaatatatagtcaaacaaatgccatctcaacaaaaattacaagagattttcaactctattgatttgaatatttggatacctccggtttctgtaccttccactttagaaattttacaggaagaaagaaatcaatgactagtcgttatattcttgatgctagtattgtcatccaaaggtttattcagcaagaatacacaccacaaacaaaaatattgtttaatcgtcttctagtaggagacgaattttatataccggaattttgtttattagaatgtacaaatgttatctggaaacaagtcaggttttatggactaccagaaacacaagcaaagttacttattcaacacttagaatatattccttttcaaattatctctgtcaatactttattatcctctgcattagaaattggcttaattcatcaattagcaatttatgattctctatatattgctctagcattacaattaaattatcctttgatcactcttgatcaacgtcaatctcaaacagcaattaattgtggagttcaaataattcctattactaattttatagaagatatctcctttggataatgtgttaataaacaattatcaatttagatacattttctttataagttctaaaactttcatagtttgagtctccagagagggaaaatcattaataaattcagctaaccctccctcactttcgagatagtcaaacaatgtttgtaaaggaactcgtattcctacaaaaaccggaactccactcataatttcgggatcggagtgaataataccttgagtttctaataaggtgtttagtgtcatgtttccttcaagatataactcgatatcttttattatagcagtgatatgtaaagttttaggactactgtgaggcgatcgcttttattacccctcaccaatgacatcaattacagctttcaacaaggtactatcatgaaaactacttttagttaaataataatttgcccctgcttctaacccttgaatccgatcctcttcccgatctttataagaaacaataatcacaggtaaattttttaatttaccattgcctctaatctgggtagtaagttcaaaaccattcatccggggcatatcaatatctgttactactagatcataatcaccgctacgaactgcattccatccatccataccattaacagcaacatctactttataaccattattttctaataatttacgttccatttctcgtacagtaatcgaatcatcaaccaccaaaatccgtttataggttttcttaactgtttgactagaagactgattaacttgactcagttggccactagaaagaattttagtaatagaacggacaatatcttcaacatcaacaattaacacaggagaaccatcatccatcaaagcagcggcgctgatattaggaattttacccagtcggggatctaaagggcgaactactaaactacattcaccgagaaaacgatctacaactaatccataatagtgaaggcgattagcgccagtaatgcgtgttcctccatcactgatgacgacaacagataagtattctttgttggcattttgggatggtaattctaaaacttgatgagcagaaattaagccgactggttgatcattcaacatgaaaaacggctgattttcagagataataatttctttaattggcaacttgacaactcgatcaatccgcgccagtccaaaagcataaggttcatgagatatttctactaataaagttcgcagaactgataaagttaagggcagttgtaagtacaatgttaacccttttccgggttgagaaactgcccgcagagtaccaccaacttctcgcacggtactatgtaccacatctaaacccacaccccgaccggaaatttccgttacagttttggcggtggaaaaacctggtaaaaataaaaattccattaactcagtttcagtgagttgggcagcaatttctggggtgatatggtttttattaattacctcttgacgcaaaacttccatatctattccccgtccatcatcggagatggtaattaataacattccggctctatgaatgacttcaatgcgaattgttccttcttctggtttgccaactgcaagacgttcttggggtgtttcaatgccatgatctatggcgtttctgaggatatgaaataatggcgcttctagtctttctaaaatatcccgatctacaagggtagatttgccgatgatttctagattgactcgtttacctaattctctggctaagtcgcggaccatgcggggaaaactttgtcctctttcggcaaagggtgtggcatgggtggcgataacttggcgatagagacgatcgcccaaattagaaaaacgctgacaaaataattccagttcattatggcgatcgcctaatagctgacgacattcaccggctgtttgtcgagcatcactcaatttctcttctatttgtctattgccatgatgttgatgctcaaattcaacattaccccataactcttgtaatttatccaattggttggctaacttggtttgatttgctttgagtttgagcaatgagtcagcaaatgtttctaaccatttggcttccactaaagattcccccgctaaacccattaaacgattaaggttgtctgcacttactcgcaccactcgttgttgtacgatgtctggaggctggggactggggactgggggttgaggactaagaactgtataggaagctgaagggataagttcttctttctcctctacttcccctacttccttatgactttctgcggatgagatgatattagcgatcgcattcactaaaatttgtatactatcatcatcaaaatggggttctgagttaccaacacaggaatcagccatttgtaatagcagatccactgcttgtagtaagacatccacatcaacaggagttaaggtaattgttcctgactgagcagcgacaaagcaatcttccattttatgggcgagggtgacagcaggatcaatttgcacaatcctggctgcgcctttgatagaatgggccgcccgcattaaagctgctaattcttctgtggggtggggtttggtttctagtgctaacagggagtcattcaagactgccccctgtgcttttacttccatactgaacaagtcaagtaaggaaagatgactaaaatctgattcttgtttcatgacagcacttttctctttaaggacataaataataattcatcatctattaaacttagactgcatgactgccagtgaaaaaagcctttggtgtaggtgttaattgttgatgtcttgctgtttgggagtgatcttaattcatcatcatcaaattggtataaaccataaaattcatctacaggaaatacccacgtattgccgcctttttcaattactatcatccgtgaatagacaataggactgagggctagtggtaggttttggatagtttccagatgcaataaattgctcagagaaatacacagttgtaattctccacgaatgttcactaatccttttaagatttcgttgctgcgatggggtatggtgtgaatacctgtcggtgatatggtttcttttaagatgtgcgctggtagtgccagccattctctttgcaagcggaaaatagctactgttagggtttgttttgtggttacgatttctgaggaatttgggaaatttattagcttgtttttgccttctgcttttgtgtcagagaaaaactgagtccattcattttgatagtttgctgggatggaacgttctaacaaattgcgtccagcagaagagtaaactgggcagttacgacaatggataaaatcggataattctggacaagtgcgatcgccagcaataccaatcacattccagcaactttctagatttgataactcagtgatggaattcatgattaattttctcccagatatttgtcattgttaactatgtaattttctccagtattatttaccttaaatttgctaatctcttgtcgcagaacttgagaaacttgattgagtttggtaattgcttggttaatttcccgtaaagaagccactgtttgcatagaattattactcaactgtgacatagcatcactaatttgtattgctccttgagactgcgcttccataccttgactaacggtttcaaatcgcggtgttaagtcttgtacttgttcaataatttgcccaatttgactactaatattcgctacatcttctacactttttcctacttctgcggcaaatttatccatttccattactcctgtagaaacggatgattgcatttgttttaccatctgttcaatatctattgttgctactgctgtttgatctgctagtcttctaatttctctggctactactgcaaaacctaagccatattcccccgctttttccgcttctatggctgcatttaatgacagtaaattcgtttgatctgccactttcgtaatcgtgacaacaatattattaatattattggctttttcgctaattgctcccagtcgagacgctatagaattagtggcttctactaactgacgcatggtagattccatctgcaataaatctttttgactatcacttgcagcgatggttgttgcttgtgacattgcagctacttcttctactgttttcactaattctctggaagtagctgatatttcttttgctgctactgttacctgatttgtagaagctacttgttcagtcatactgctttctagttgttttcctgatgctgctatttgggtggctgatgaggtgacttgtatccctgactgttgtacttggcggatgagttggcttaaattttgtgtcatattctgaaaggctttcaacagttgtccaacttcatctttggtattagatataccttcattttgaagtacagattgtgttaaatctcctgaagaaattttttctgctgcccgtacagttttatcaattctattacctaaaaatttagtaattaaaaaattagcaactaccacaactgacaaagaaaacacagacgcaattatagctgctaaagttagtaaatctatagcagattgtgtggaggcaatacttttttgcaaactctctgtttcatattgattaaattcacgacctatttttgtaaattcatctacaagatccctggattcgttaaaaactcgaattagttcttcttttttagtgccgccactggcccttctgactgtatctgcttttaaagaattatattggttatataaatccaccattttatctatcctttcttgttgctgtttatcagtaacaattttcttagtttgttctagtcctttttgaaactcttgctgatgctctgtatattctcctatggcatcttgatataaattgggatcgatgacatatctttgcaatcgtcggtgcatattcaatccagcaattaccatttgattttgtccatcaattgctgtttgtgccatatcaacttgctttaaagtttccctagtttgatgagagttagcatataccattaagctaaacaaaatcattaaaactgttggtactgaaaatccaaataatgttaaatctttgattttccaattagtgaacattgaacttctcctgaataatttgaataaataacttaataatcctcaatatttttcttttttttcattcatttcatatattgttgttcctgctgtttgatatgctagtcttctaatttctctggctaccaagataagcgggaaatactaaaccatcccaccatacccacgaatataaccagatttcctattcaaccaaaagcagttagtagtcgccattgaagattcatattttttacactattgaatggttaatattaactatgtggtctgttgcaattgttctaacacctatttgaatattgcacaagacattttaaatacctgttgcaatacttcccaaatcagcaaggtaattaaaataattgtaaataaacaataaaaaacttcatattagtttacaagataggaatttattggttatgacttagctagattttatagccgccggatacgttgccaaagaatattagcactttttatatccccttcattttcttttagtaaagctaaatggattaaagctgctagatgattcggttgcagataaattgctttttggaaggactgtaaagactcttgatgatttcccattgcttgctgtaactgaccaagcaatacatagccttctacacggactttattttgtttaatatagtcattacatagtttaattgcttctggtatgtaaccttggtctgctaataattgagcagtttccagtaagttagctgtggtttctttgggtgatttattgacatttaaaccaacagaagttggtgttgaatttttatcaattttggttcgtggtgagtgggtgagaggagattttttttgactattattgtgatttttatggtggtttttggtttgactatttgtgtattctttagctttgaataaactaggagaaatagcagatttacgataggcaaatgctaacagatgacgtataggagcaaaacgagattgcattaataaaccagcttctgcgtgtccgataaataataaacctgtgggatttaataacctttctaaaattctaatggtgcgttccttagttgtcatatcaaagtaaattaacaagttacgacaaaatacaatatcataagttggcatacctatccaaaaatcaggttttgctagattaccttggtggaaatttaccgtagattttatttgttcatggagatggtatccggtttcataacgttgaaaatagcgttcctgaaaggaaagaggattaccacgaaatgaatattgattgtagattcctcttttagcagttagcaaacactttttgctaatatcaactgcatcaatggaaaaattagcaggatttaaccctgcttccaatagagttatagcaatagaataaggttcttcacctgtggaacaaggtacactcaaaacccgcaatacactatttttatgatttggcaaccattcagatattacatattgctgcaaatatttaaaagattctctatcccgaaaaaaccaagtttcaggaataattacattgtcaatgagtgcattccattcttgtgaagattcctggattttttgtaaataaatgtttatatctgtgattttgcattctgccatgcgctgcttaatagctctagcgatcgcatcagaaccaattgagttaggatctaacccaattttttttctcagtaaagcttccccttgaggataaatcattttccaagcagcgcactaattagcactaattatttttattaactatgaatttctgctacaagataagcttgctgcacctctgataataaatactcaacgtgaaggcattgaataagtccttgttcatctactatcattttacccaagtaaggcggtttatctatttgaagatccacatccacaaaatcaacatccgatttttgcaatgtttctataactctttgtgccatcaaacccataatatgaggtgcagaatcctctgttgcatctctatcccaatgattgattaaaataatgcgtgtactcaagtgttctttgcaactttgattactcatcaactgacaaagatcaattacgggaataatccgccctcggtatttaaaaacaccagcaaaatactcaggtgtatggggcagcttagtgaggttaacaaggggtataacttctacaatatgttgactagctatggcgtagcgttgattattgacttggaaaagtagcattaacattaatttattttagttgttagttgttaattgtgaggaagacaaatattttccttttacttcctaatatcttttatgatgctgatgattagagcataattaataattacaggatattgcagatcaatcaagtaaaaattttgatcaaaaagccttgcaccaaaagggttttactgctgaccgctgaccaatgaaagctgctgtaaataaaatactcaacttctgtgaaaagtcgagtatttggatattgctactaattgttttgtaaatattcaatggcagcatctaattttgatgggtatgcttccgcaaacctttcaaaccaaagtccttcagatgagaagggatctaatttagataaccatgcttgagcttgcttctgcaaattctcaagttgttgagctttaagttgtgcttgacgaattttttcctgttctaattcttgctgttttctcaattcttcagccgcatcttgttcagcaaaatcagctttgacatctgctaataagttatctattaaagcatcggacttagaagcagaattcatcaagggtttggctgtagttactgttggcttttgtggctgctgtggttgaggtttttcccctttgtattcagcctgaatttccgctaataacttatcaatggagtccattgtaaacactcctcattatgagtttagctagtgagtttagctagtcagtgatggcattaagtagcacttctgataaactcatatcttccatatcttccattgttactgtatcacaaatatcaaattttgccccagcactttgcagttcatcatctaaaactttcaaaaagcgagtagcttgggcatcagtaccaacttgaatgaaggaaattgctaattcttcatctcgatcaagtcggcgcgatgcttcgataataactttcattactgccttacgatcatcaggttcaccatcagttacaactaaaattgtctcgccattttctttagtttgtccgctagatttacgctgaaaataatcatcggtggcgtgtttcaatacaccggctaaatcagttgtcccggctggatcattttcccgaaaaatttgcgctactttactagatgtgacattttcgtaacgtttaaacctaccagaaaataaataaaccgttatcccatctggatctaattgttcgcatttactagccaaggcaaaagtagattcttgtgctgctacccatctggttcgtccacctttttgatctggggtggccatgctaccgcttttgtctataattaaagtgtaatcacgattgtctaacatttttccattctccatttatcattagtcaattcagccagcttgagatactaaatatttagtcatctatggcattgattaaaacatcagttaggctcatttcttctaaatcttctaaggtgatggtatcgcaaatatcaaattttgccccaacagttgttaatttatcatctatagctttgagaaattttgtggcttgagaatttgcacctacttgaatcatggaaattcctaattctttctgttgttccattttgtgagtagctttgatgatgatctcaaatattgcttgtcgatcgcctggtatcccatcagtaataattaagattatttccccgttaggcttggttttaccagttgctttacgttgaaagtagttattaagggcatcttgaagtacacctactaaattagttgtatccgcaggttgattttctgcaaaaatttgggctattttctcagaagtaacatgatcaaagcgttgaaatttgtgagaaaataaataaatagttataccatctggatcaaattgttcacacttacgagctagagccaaagtagattcttgtaaggctaaccatttggtttttccacttgttcccaagggcttacccatactggcactgctatcaataagtagtgtgtaatcgcgattttctaacatttatcattctccattgatcagtcattaaagtagctattaaagttgagttgatggttttgagtcaggagtcaggagttttttattttggattttggattttggattttggattttggattgtttttgtcaactccaatctaaaatctaaaatctaaaatttttctccctattccctattccctagcttcacgacaagactttttcactaaaccctaattagtcagtgatggcattcatcaacacatctgccaaactcatttcttctaagtcatctaaagtcacggtgtcacaaatatcaaatttagcgcctacaccttgcaactgatcatctagtgctttgagaaattttgtcgcttgagcatctgagccgacttgaatcatggaaattcctaattcttcatctcgctccatttgcctagtggcgctaatgatgacttcaaatacggctttgcgatcatcaggttcaccatcagttaccactaaaattgtttctccgttgggtttagtttgccctgaagctttacgctgaaaataattattgagggcatcttgtaatacacctgctaagttggttgtacccgcagggtcattttcttgaaatatttgagcaactttggcggaagtgacattttcgtaacgtttaaatcgcccagaaaagacataaactgtaatcccatcagggtcaaattgttctgcttttctagctaaagcgagggtagactcttgggcaatctcccatctacttctaccaccaacttggtcaggagttgacatactgccacttttatcaacgattagggtatagtcgcgatcgctcatcataaatacctctaatgatttttcggtttctattttaactcttaggtcagacgatgatatctagatgtagaggtattgtaataatcatttaaactattctcatctataaacaaccgttttctgcggtaaaatccctaaataagtcaatattgcagcatgggtaaatgtcgagctttcaagttaattcactcagatcaggagaaaaactatgactattaccaatgtcacagaagcaacattcaaacaggaagtgttggatagtgagactccggttttagtggatttttgggccccttggtgtggaccttgtagaatgttgtctcctgttgttgaagaagtagccgctgaatatgaaggacaggtgaaagtggtgaaagtgaacacagatcaaaatcccacagttgctagtcattatggtattcgtagcatccccactatcatggtatttaaggggggtaggcaagttgatacagtggtcggtgcagttcctaaaactactttaactaaaactctagcacagtatattcctatgtagtcattacctgtgatcagttatagcaggagtcaggagaatggctaactccatgcttacttcgacaccgcccttcgacaccgcccttcgacaccgcccttcgacaccgctcaggacaggctcaggacaggctcaggacaagtcgctatcaagaagtcaggaacaggtaaaagatgtgattaggactaaagatgatgccaagattgcgatcgctgtcttggtaaatataggttatgcgtaagtattcagctataggaatcttgcatacccagatccccgacttctttaagaaattggggatctttttgaaagtaaagtcatgtttgatcattgtttctggacagacaatacccaatacctccagattcgatttaatcatatctgtaataattacacaattgagtggtacaactgataaccacgagattaaatatctaattgcggcatagcgagcgataataaggttaaaaaaaatcggtaataggaaattttcaaaatatgagcggtaaattaattgtatttgaaggtgtggaaggttctggtaaaactactcagatgcaactgtgtagtcagtggctagaaactctaagtgtattagttattctgactcgtgaaccagggggaacaaagttagggaaacatttacgacagctattgctggaaaaatcagaggataaacctgtgggtgaggttacggaattattattatacgctgctgatcgggcgcaacacatcgagcaggaaattaagccaaatttagcagcaggaaaatatattttatgcgatcgctatactgactctactattgcctaccaaggttatggtaggggtttaagtatgagtttaattaatcaattaaattatattgctacaggtggtttacaaagtgatgtaactatctggttagatgtggatgtggaattaggactttttcgtaaacgtggtcaaagtaaattagatagaattgaacaggaaacaatagattttcatcgtcgtgtacagcaaggatatactgaattagctactaattatccttctcgaatttttcgagttgatggtagtttaaatcaagaattggtgcatgaaaatatcaaggaaattttaattcgtaattctgtgatatccgaaactccctgaaaataattagtgaagattttttgtatcgaacctcagagacacacaagacgcagaggaattagattttttctgggttttatgatcattgcttttgattattattaattaatgattttttatttctctgttatcctgactcttctacgggcgttcgcgaagcgtactggaagcatcagcattcggacaaccaattatcaatttttgtcccaggttattttcctgtaagggcgaagcattcggccgaacaattatcaatttttatcacaggctattttccgaatgcttcgcccctacttcgcccctacttcgcccctacttcgcctctacgactcctgactcatgactccttataaataatgtttgaagaactaattggacaacaacaagcaatagatttattaacatcttctgttaaacaaaacagagtcgcaccagcttatttatttgttggtgctgatggtgtgggtagaagtttagccgctaaatgttttattgaattattattttctagttctgtaaaacctgaacaattatctattttaaaaaatcgtattcgtcaaggaaaccaccccgctttattttgggtagaaccaacttatcaatatcaaggacaaaggttaacagcagcagaagcagcagaaaaaggagtaaaacgcaaagcacctccagttattcgtttagaacaaattagagaaattacccaatttttatcccgtccacctttggaagcgcccagaaatgtggtagttttagaacaagcagaaacaatggctgaatctgctgctaatgctttactgaaaactttagaagaaccaggacaagcgactttaattttaatcgctccttctcctgatgcaattttaccaactttggtttctcgctgtcaaaaaatccctttttatagattagataatgctgctgttgctcaagttttaacacaaacaggacatggggggattttacaacatccagaaattttaagtatagctgctggtagtccaggaagtgcaattttagcttaccaacaactacaaacaattaatagtgaattactccaagaagtaaaaaaaacacctaaatcttatcgtcatgcgttagaactagcgaagaaaattgataaagaattagacacagaagcacaattatggttaatagattatctgcaacaattttactggcaacaaatacataaacctggcattattgaacaattagaaaaaactcgcaagaatttattatcctatgcccaaccccggttagtttgggaatgtacatttttagcaatattgcaaattcggtaatgagtaatatctaatttagaataattcttaattacagccaattaaccatacagacagtttgttgacataccataaattacataaaattctgttattaaaaaaacaaagtaataattattaaatgtacactactagacatcaaaatcttttctttgtatttcataatatctacagaaagcaaggatattcagattatcatattccccttcttgctctctacctttgctctctactcattctaaaagtttaacttttagttttttttgacaattaataaaaatttacgtaacctaaaccaataggtctagagtatcgaacttgtaggggcgaagcattcggatgataacctatcgctgaaaccagttcatattccgtccgaatgcttcgcccttacgattaatgaatcggtgttctagtaaatcaaagcctgaacagcaacttaacagcaattgaatttagctacatcaaaaattgctgttacagactgtttttatgagtatatgaattgacttcacatcctttgctaaaaattgctgacaaattagctgttaatcaatacaaaaatgacaccatattaacagaataatatcacagaaatattctaaaaaatatgagtagtcgtgattaatagtagtaactttgatgaattattgaagtttgtccaaggagtaatcaataaatctaggagaagttgatgattgagtatttaacgtcgttgaacgaccacaatttaccatatccagatccactgcatcccatcgtggttcactttgtaattgccatgatcttatttgcagttttctgtgatttaattggctttttaactggcaaaactcggttttatgaagtgggttggtggaatttatttgtagctaccgtatccatatttatagccattatttttggacagtatgaagcaggtttagccaaaccttacaacatcgtcaaatcagtattaaattaccataccttaatcggttggtcactatcaggaattttagcagccatcacagcttggcgttatgtacttcgcagtcgtgatccccaaagattgccaattcattatttagcagtttgtttacttttaaccatacttgttggttttcaagtatatcttggtgatgaattagtgtgggtttatggaatacatacagtacccgttgtggaagccgtaaaggatggaatattaccatgaattcagaattaattgatcaagtcagcgcccaaatgggagcaaacggactaccttacacaattcctattcatcctaacctagttcacctcacattaggattgttcattattggggtaatttttgatttagttgctgtacttttccccatagaacaatggttatttaaatcattgggtttagctgtagaacgcgcccaattatttgaagttggttggtacaacatggtagcggcttctgtgatcacatttttcacagttgctgctggtttttatgaaatgttgttagcaactcccccagtacacttaaaaagttcctggggtttgcaagcaatgtccacgatgatgtggcatggtgtgggcggtgtttttctcttagctttaatggtaggaatgacattttggcggggatggcaacgttacattacttgcaaagactccgatatgcaagtgcgttggagttatatttttgccggagttttcatcatggccttaatgtatcttcacggcacattaggagcgcagttagcagccgaatttggtgtacataacactgcggataacttgttaagaatgggacaagacattaatcaggtactaggtaattaattcgtaatttgtaatttgtaattcgtaattttcagatgccaattaattaccaattaccaattactaattaccaattaccaatcaccaattaccaattaccaattaccaacaaatgaccatgaacactcggttgattttaaatcttttcctagtgatggcggggggttttgtcatcacaattgccagtatttttatcggtaaacaagcctattcttggcttcccccccaagctgcggctgaatcacatttgattgatgatttgtttagctttttagtgacaattggggcttttattttcttaggtgtcactgccgctattttgtattctgttctttttcatcgtgccaaaagttatgactttagtgatggtccacatattgaaggaaatatcactttagaagttgtctggactgctattcccatcatgttggtattgtggatagcaagttacagttatgaagtgtatgaaaacatggggattcaaggaccttcccaattattacatttacataaccccttacctgtgcaaattgcccatgcagaagtgcaagaaacaccaggagaaactgttagcgaacccttagaaaaaattgacgtaattgctaaacaatgggcgtgggtgttcagttatcctgaacagggaattacaagtacagaattacatttaccaagcgatcgccgtgtacgtttagccctacaatcagaagacgtactccacggtttgtatattcccgcatttcgcgttaaacaagacatcgttcccggtaaaaccatcgactttgaatttacccccattcgccccggtaaatatagcctcaccgactcccaatatagcggtacatactttgccaccatgcaagcaaacgtgatagtagaaaacccagaagaatatcacgattggttgaaaaaagccgccagtcataatcccacagttgcaccaaaccaagccgctaccgaatacgcccaaaatcacaatcaaaatgtacaaaacggttgggaaactgttaaacctgctgcacctccagtagttaattttgcaggttaattaattctttcttcctttgcgcctttgcttctttcttcactttgcgcgaaaccttctttttgtctgaatcaggatgtccaggatttaaggattaacaggattgtgatgaaatccaaaatccaaaatctaaaatctaaaatctaaaatctaaaatccaaaatcccatgacaaacatatcacttaatcttggtggtgaatcacatcatcactcaacgccaactcactggaaaacctatttcactttcagcacagaccacaaagtaatcggtattcaataccttgttacttcttttattttcttccttgtcggtggcatttttgcgatgattttacggggcgaacttgtcacccctgaatctgatttaattgatcgtacagtttataacggaatgttcacaatgcacgggacagtaatgctgtttctgtggacatttccctctcttgttggtttagcaaactatctcgtacccatcatgatcggggcgcgagatatggcatttcctcgcctcaatgctgccgctttttggatggtcccagtagtgggaattttactcatgtccagcttttttgtccctggtggaccagcccaagctggttggtgggcttatcctcccgtgagtttacaaaaccccacaggacatttaataaatggtcaagttctctggttattagcggtagctgtttccggtgtttcttctattatgggcgcggtgaattttgtcaccaccattgtgaaaatgcgtgcgccaggaatgggcttttttaaaatgcccttgtttgtctgggcagtatttagcgcccaaattattcaattatttggacttcctgctttaactgctggtgcggtaatgttgctgtttgacttaacaatgggaacagcattttttgaccccagcaaaggtggaaacccggtaatgtttcaacattatttctggttttattcccaccctgcggtttatgtaattattctgccaatcttcggaattttctcagaaattttccctgtttattcccgtaaaccattatttggttataaagtagttgccatttcttcgatgttaattgctgtggtcagtgccattgtgtgggtacaccatatgtatgtgagtggaacacctggttggatgcggttactattcatggttacgaccatgtttgtatctgttcccacaggaattaaagtatttgcttgggtggcgacaatttggggtggaaaaatcaaattaaatacaccaatgttatttgcattaggtggtttaattatgttcgtttttgctggaattacaggaattatgctttcctctgtaccagtagacgttcacgttaataacacctattttgtagttggacatttccattatgttctctacggaacagtaacaatgggaatgtatgcagccctctatcattggtttcccaaaatgaccggcagaatgtataacgaaggttggggaaaaatacatttttggttagcatttatcggtacaaacttaaactttttacccatgcacccattaggtttgcaagggatgttacgccgagttgcttcctacgcaccagaatatacattttggaatgttctcgctagtttaggcgcattcctattaggaatgtccaccttacccttcattttcaacatcttagtttcttggttacaaggtgaaaaagcacctgacaacccttggcgggcaattggtttagaatggctcatttcttcacctccatctgtagagaactttgaagaaattcccatcattattagtgaaccctacggttacggaaaatcagaaccattaacagccaacctagaaccccaaaccataaaaacagccgaataaaaacaatacagttcagttaagttaagtattaaacaattttttctcttacctctgcgttctctgcgcctctgcgtgagataaaaaaatcaaacttaactgaacagtattgccaaaacaaaaggagaacattaccaatggatagttcaatcaaaacgccacaaatacatcatgcagcccatgaacatggacacgacgaagaaggcagtaaaatgtttggttttattgtctttcttctatcagaaagtgtcatctttttaagtttctttgctggttatatcatctacaaaactacaaaccctaattggcttcctgctggtgttgaaggattagaaatagtcgccccaacaattaacactattatcctagtttctagcagctttgtaatttactttgctgagagatgtttacaacaacataacctagcaggatttcgcatctatttgttagctacaatggcaatgggtagctactttttatatggtcaatatgtggaatggagtcaattagaatttggctttacttccggtacttatggcgggatgttttacctattaactgggtttcacggtttgcacgttttcaccgggattttgttacagtctatgattttgattcgttcttttattcccggtaactacgataatggtcactttggtgttaattcaacttcgttgttttggcactttgttgatgttatctggattattttgtttatccttatttacgtttggcagtagggattttaagacgcataaagcaataaattttgtaggggtttagcaatactaaacccctacccatatatttgtatcatgattccgaaatcatctatttgggaaaatagcgataaatatttttccgatgtaaaactctttcaaaaattaatatttcaccatcaaaaataacacccagacgataatcacctatacgaatccgataagcattatcatatccgtgaagtcttttaatatttgtgatttcttcaaaactcgatatttcgattatttcttcaaaagcaaacttcttgatagactcatagtaaggtgtactttttagtgcttttaaatctttaataaaactgggtagatactggatattcactcttattccaattccgctaaagcttcatctaaatttaatggtgtctcattttctacttctttcatagctagaatcagtccttcatcttcgagtgcttctagcaaccgtagatattcctgaaaatccatgactacttttctgatattaccttgaatatcagtaatcaattcttgggcaaatggatatttatcagcttgcattttagtgatataggattactatctacatttaatttagcatatttatatcaggctatgcttaatgtcttcttacttttgttcttaaaaagtatgagtataacctttttaaaagactaagtttaaatatctttttgtgagcaattttattttctcccctgcctctttctttaaacagattaatacaaagttgaccacgcttgatcaactaacatactcaactagcgtcgttgttgtccatttaacagcggatcgtcttctaaaaccttcgcagttaaatattacaaagattgacctttatcgcgtccaagcttgactactccggcaataaccgcagctaccagttcttcatcaactggttgttgtctgagtccctgctatccaggacgtttaagtttttcctcatagcatcaaaatttaacctcaagggttttcagccttttttattataaatttagataagttttacataagttccaaaatgaatcataaatttaacaaactattaaaatttcttcattaaatattcaaacaattgatagggcggagtttaacgtacttaatgtacttattgcctgagtcaaatctttgtgagtagatagacaggagatatcagcagaaaatgaaagaaattctttacttggaagttcctactaccgatagtggtgctgtccgtgactggctacaaaccgactttgtgccgggaaatggagaaaaattattgaccccagatggtctgcgtctgcgaaacccggttgcatctgtcaaaggacctttagcaaccgaactttctatatttgtgtggtctgtacaacgcaccacttacctcaaagtgtttcgttggggagacaaacccttcactaacgaaggttcaatattgcaacgtctgactacaggtattagaagctgttttccccatcaataccccgaaccaccaaagattgaccctcaaaagtcgatttttgcagagctagaaccctattatcccctaactgtcaagtattttcagaaaatgcctcatggggaatatgatcttaaacgtgcttactggtgggagcaacgttggcgagaaggtgtcaaaaatcctcagcaaccccgtcaggtggtgttttatgcagaaaaccagcaacaaacagcagaaaacacttatgacctcatttatattggtggcgctttgggtgtgattcatgccgcagtcatggcaaaattaggctataaagtcctattggtggaaagattatcctttggacgcatgaaccgagaatggaatatttctcgtgatgaaattcaaactttggtcaatctcggtttattaacaaatgcagaattagaaaccattattgccagggagtataaagacggctttaataaattctttgatgctaataatccgcctcacttaaaagcaccagttctacacacgccaactgttttaaatattgctttagattcagataaattattgcaattatgtggtgaaaaacttaaagccgctggtggtgatatttgggagcaaacagaatttatccgggcagatatcagaaaaacacaagttactgttactgtcaagggtgtaaatacggtaattgaacagcaggtaaatggtagattattagtagatgcaatgggtacagcttcccctattgcttggcaattaaacgggggtagagcctttgatagtgtatgtcccaccgtgggagcagtgattgataaaggatttgcccctggtgtctgggattaccattatggtgatgttctttacagtcacggagatatttctagaggcagacaattgatttgggaattatttcctgctgcgggggaagaactgacaatttatttatttcattatcatgaagtgaatagaaaaaatcctggttcgttgttagagatgtatgaggactttttcactattttgccagaatatcgccgttgtgacatggataagctagtgtggaaaaaacctacatttggctatattccagggcattttagtgttagtgatagcgatcgcaccatagcctttgatagattaatcgccattggtgatgctgcttccctgcaatctcccctagtatttactggttttggttctctcgttcgtaacctagaacgtttaaccacactcttaaacaccgccctcaaacacgacttattaagtttccgtcacctcaataaaattcgtgcttaccaaagtaacgtttccgtcacctggctattttccaaaggaatgatggttcccacagggaaatttatcccacctcaacgggttaatgccatgctcaataccttctttggtttattagcagacgaacccccagaagtagcagataatttcattaaagaccgctgcgactggttcacatttaaccgtttagcattaaaagcagctacaaaaaatcccgccttattaatatggatttgggaactagcagggttgagagacttagttcggtggttaggtaattacctcaactttggtgtttatgccttcatcagtgctttactaagtacatggtttcccaaattcctgaagtggagtcaaggctggctagaaacccgctttccaggattgtggttaaacctattagtgaccaactacgccatttctacaggtaaaccacgattacgggatcaagtagttaccgttaagtcaaaagcagtaacccaaacaagtcattaattaagtagtcattagtccttggattattgacctttcgacttggggcggaaatttggtagttccaccgatgctaaagatttccgtcccttgggtggacgctggggataaatcaaaggtgaaggtgatttatgatcaaggtgatattcacctaaagtttctgatctgaaatgctcttttggcaattctgaccaataatcattattttcgggaatattggcaatattttgctctttttcgggagtataggcatttattagtgattcattgctggatgaaagtgtaaactctggaacatgactttccgttactaaagactgttctatgattgtttccagtggctcatttttttccagatttgatgctaaggtatcccaaattagcccatcatctggatgactctctgtatcattgactgttggtgaagttgagggtgcagactgagaagcaaaaaacatttcgatcagactttccaactggcgatctaaatttgatcccccaggagaagaaacatctgcaacttcagcagtagattcactatcctctaattggggacttgactgtattgggatttctatatcatccacatcatccacatctgaagatttttcagcaggttcagaaatggaggtagagtaattttgttgatcttgttgatcagcgcatggagttgaaggttctagccaggaattatctaaatgttgacgtagagtgctacaagtatcatgggtagcatcggtttccgcagaccaaggtttaataggttgtgcattgggaaacaaagacctggcttttctagaaaatctgctatgtccaccagtgagatcatggggatgatagacagtatcctctagggtgtcatagttggtgtcatagttggtgtcatagttggggacaggggtatctagacatttttccagtgctgctttaaattgcaaagtttgacgttgttggcgtattagtcgagtacgtaattcccgacaagtattttctgagtgcaatagttggtgagattgttcactatagttagtttgtagcagtgtacattccctttccagttgggctactcgttgctgactcagttgtaactgtgccttatgggtttcaatgaacatttcctgactttgaacagtttgtacagccgtttctaattgctggaaaagagactgaatttgctcttgagccgttgctagttcctgagtttgttgattcaacattgagtcagtgacactagagcgttttttttgccactgcaaaatcttttctgcctcagctaattcttgttttagctgctttacttgagcatacaaatcaccgttagctgtttgtaactcttcattcagcgtcagcaacttctgaaactctgaatctaccagggcttgtttttcactgtcaggttctgcaatccaatctttttgggtattatgatcttgtaaattgtctgtaactgtagattcagactgctgtatatttagcccgtcgtcaacatcatctgctgggttcaggagtggtaaattagtcacggctgtattttcatcatgcagaactgagtaaaagggacaactcgcctgctctgatttcggcgaatttgcaaaatttcggggttcaatcacagtgccattgtttgaggtgtcacctatattcatcactcttgacccacctgcttaaaaatattcagcaacgctcatagcagcattactgatcaaatatgtttgattctgaggtaatcaggattgcctctagaagccaagtttaactgctatgtaaatcttagacaagtctagattgctatggtgtactatttttgcttcccaggggtagagggtgtgaacctacttgacgtttattaaaagttatatcaagttgctaaaaaatattattgaaacaagaatccccgtccttttaaggcggggagcgtcaacaagccgtccccatgcactcagctactgtaatttggtagagattatcagagtttaaagtattttatttgacaattttgattaagcactggggactggggactggggactgggg

SEQ ID NO: 50 - DNA, 40337 bp, Sphaerospermopsis sp. LEGE 00249
  LEGE00249_65
ggactggggactggggactggggactggggactgggtaatcaattttatttttcccaatcaccaatcaccaatcaccaatcacccattaccaattaccactattgcacagaaactaacagattttgattaattgtcatttctaaatcagtgttaggttcaatggcaattaaatccacactatttctaccaaagaaaagaccaatcagcgccccaataccagcacctccgagaacttcttctgtagccacggcgcgatcgcctgtcaccgcagatactgctgctgctgctcctgctcccaatatagtatttctgataattgaactggtgctagtgcctttcctcacagtttccactttggtaatcacatcagaactagcactcacattatattcttgccctgtggttaaaactaatttttgtgctacaaattgagaaccaccttgagccggtctaagttcacctatcacctgactccccgcaggaatcactactctaccatcttgggtaattacactttgtgatgtagttaaagttaaaggtgcagtttcatctttagtcaccagaatcttttcagcccgttcatacttgacaggaatcactgttccttggggaatggtaacagttgtaactggtggtggtgtggtttgcagagctacaatataaggtgagttaatagttgcagcctgattagcactcactaaagcttggtaaatgaaagccgctacttgcgctctggttgcagttacaccaggattgagaaatctcacattaggatagttaactacaatacttctttcagtggccgcagcaatgggagtacgagcatagccggaaatacttgcagaatcattgaataatcgtagagtgctttccacattaccagtagcagcatattctaaaccattagccaaagaaactaaaacttgttcacggggaatagcttgattaggtctaaaaacattgccaggatatcctgataaaaaaccaatagagtaagcttgtctaatggcgttatatgcccaagaattactaggcacatcattaaaattgataggttgccgttgtgcagacttgctaaaagctttattaatcatggctgcaaactgcgcccgtgtcactggttcttctggacgaaatgtaccatcaggaaatcctgcaattacaccccgttgtgataattgttgaataaattgtgatgcccaataattagatgaaacatcagaaaaaccagtttgtgctaaggttggtgcagatgttattaaaggtgttacactgccaactgtgacactcaaagccatgactaaggctgtttttgattgcaagcgatttaaagtaaacattgattttactcctgtaaaaattataagaatgaacaaggaacaggtaacttttaacaggggataggaaaaacattaacagtcttttgctatctgactttgataatcactgtttgtcctaacctacctagtaactgctttatttgttttttttgttatctactctgttaactacttagacaattttcaccttaaactgttcccagttgtttcttgaatttgtaaatagttttacttttaggtttactgtcattgatagaaatacgaatttagtaacagcagtgaattatgactttagtcatctactttagtcatctattaaatattgtttttaacataaaatcaagcgatcgcacacaatatttgcaatggcgatcgctttttcagcatcataaaactcacgactgcaattaagttaagtctagttacgagatagtaccaaattagacaaaagtgtgatatctaaatcctcttccggctgcaaaacgaaaacatcagcctgtttcttccgcaacagcacacttgctaaagcacccgcagcagcaccaccaataggttctaaagtttcaattttcttgttacctgtcagtagtgaaatcacagtagcagcaccagcaccgatggcagcatcagttaaaatctgtccagtatcactacccttagaaattctttgcgtttgggtaagagttttagaattagcattaatctgctgccgtcttccactggcaaatactaattctctagctacaaagcgtacaccttttttattgttactgttaggcaggttcacaggttgtaactcccctaccacctcagtattagccggaatcaacacatttctgttactgtcgataatatcattagctattctcagagtcagaggtaatttttctccgggattcactattaccttttctttttcataagtcacaggcaaagtgacatttgccggaatcgtaatagttcggggttggttaatattgaattgtccctgattaaattgtgcctgagcaggagcaaaggtaaataaaggggtgacagcacctgtagtaatggctattgtcatcagtgccgcagttccagactgccaactcataagacttctcatatatgatatttccaatgatatggatagatttgatgacgtgggttgacccggatagtttcttctattatcagttatccgttagcagttgactgtgtttttcagggtgacactcagtttcccagttaccaagaggacaaaaaagatgagtaagtacattatttttaaagctgaggatgcaagctctcaacagtgggaacaaatgctattagctcacacaggtgcttgtactgatatacttgcagaacattacgatggttccaaaaaaccaattccccaaccaggatacagactaagagattttcacacagttgaaaaatttattgatcctcaatttccaggtgcgagtacccatagcagggtaggtgattgggaagtaacaaaagttgaagaatatgtacctaatttacctacaggtggttttgaatcagtagtgatttgttattgtcactactctcctatggttactccactagaaccattacccagacttcaatttgcacaagaattacagcaagtttagacagcaaatatacaactactgattcccaaaacaaacaaaacagcccacaaaaatcagcatgacagatgagatcaaaccctgccaataatctgtatttttgaggattacccaaatgagtgaaacagctactcaagtgcctataaatactattgttcctatgctgaatgcaattagcgatcgccaatgggagcaatttaaaatgttagaaactgattttgtacgtcagtatggtctagaagtatgggaagaagtgtttaatttccgtctcaaaccagcattagataaagattcagaccgttggttgttggttcaaaaatgcagccagggtattaaatcagtaaaaacagtgacttagttgaggcgatcacctacctacggctagttaccaaaggtaagtcctatgggtaatttggtaacaggtgagaaaatcctagttttaatcctgttcatcctttaatcctggaaatcctgattctgacaatttcccaaacaaaaacccgccctggggcgggttaaaatttgtaggttttatgaaacgtctactaagctactaactcaacttagaagctgaaggttgtacgcaaagtacctacataaattgtgtcgttgttatcgttgtgttcaggattgaagatcaccaacaaaccaggagtaatcaaaatgttgtcggaaaccttcatcttatacagaccttctaaatggtaagaagtgctggcttctttagtaataccaccactaccaccagtaactttaggtggttgaccaaagactaaaccaagagtgttaccttctctaccaaagtctttcagacctaatgtggctgcccagtaccaaatatctgcacttgcagcaggaccagtgacagtattagcagttgtgtaaccagcccagccgcctaatgtaattttagcactggggttaaaggtaaactgtaaaccgtagttgttagattcaacaggaacagtagaatttccatttactgttgcactacctgtgttacccaataagttcacctcaccagcagtctgataagattgagcataggtgaaacctagatttaaggctttatttggcttgaatgctaactgaccaaaaatagtgctactaccatcaaacaaaccttcgccaatagcaggattagcagcctgatttctacctctagcaaaataagctgcacttaaagtcaatggtccttgaggattaacgttaacagtgatacctgcaccatcaccagctaggcgatagatagggctgaaacgtccataacgggatagcgcacctgaaccactgcttctgaagtcagggttgaaaacgttcacgttttcattcaactccccaccaacagcgtcaatcctgacacggattttttcaccaaagttgaaagcgtagttgagtttgtcaatttcaactgagttcccagtaccagtaccagtattagcttcatagcctaaacgggtcattctagtcccagtcgaagcagatccagttaaactatccaatgattgaatatttccagcctgtaaacgggtttgcaacacatcagtacccatgaagctgctttctaaactcaaccgcacccggttggagaaagttatgttgctgtctaaattaggattgttattggggttgttgtcttgatcagcttgtttatccccaaaagcctgagacacactgaaaatcgcttcccctctcagcttggtagtagtagaaaactgattagcttctaactcagcagtacgagcttctaaagcatctacacgaccacgcagagttgctagttcagcagaaaactcttcttgtaatcgttgcaaggtagctaaatcttccttgcttaccatgtcagcggtagctgtagcaatcaattcgttaactcggtctaagcaagcattcaaacctgctgcaaattcataccgactcaaagcacgattaccgcggaaagtaccattaggataacctgcaacacaaccgtaacgctcaactaatgactgcaaagattgaaacgcccagtcagtgggttgcacgtcggaaaattgagaaacggatgttacttgaccgatgctattagcttcttgagataactgtgcaacactggttgcttgttgattgacttcgtttgctaaggcactgttagcagacagcaaggtagctgcaataactggactaacttttagaacattccaaaatagttttgtcatgtttttactctcactcacacctaaggaattttgatgattatgataaaatacccgaagttttcagggcatttacacataaaaatctttgtattcactatatattatttatggtatccagcacaagtcccaaattaatattttaagttaatttttggaagaaatactggttaattgggtctgtaaattcagcacaacactgcgtctatgacgtgatatttttccttcttcctcaaatttctgcaatagtcgtgtaactgtgactctcgttgtgttcaacacctctgatatctcttgatgtgtaagatttaaatcaatcaacttaccctgttctatatcccgaccaaatttttcactcaaccacaccaaaaatttccacaactttagagaagttggcttacgatgtaatatgcttaaaagttcctctgtttgctgaatgtagtgcaataatgcctttatctcttcatgccagagatggggcggtatcaaagtcgcttctacactggtcaaacactcaatatggtaggggttgacttttgacaaaggatagccaactatatctcctaaactccaataacccaaggtgatatatgttccatcttcattccaagtcaaggtacgaactaaccctcgatcaatacgccacaatacatcattgctgactggaattattgaccgacgagtaaatatttgttggtttaaatgtttgtttttagggtagatgagggtttcagttgtggaaaacatcatttttagttagatgggtataataggtataaatttaaataacgtaagttgctagttctgcaagaaaggctctcaaatcgaattaagaaggatacgtagacagcaaaaaagcagggaacaccattataattcattctttctcctgactcctgactcctattcctaactagcaacttgggttaatagattttagatggaagatatttttacgctatcttgcattgactgtaatattaaaagtttaagaataggtaagcttttagtgaaatgtatgttatttagggtttgctgaataaatatgaaaactttacaggtaaaaagcaagatatatcaagggttagtagctagttactgttttcttaaccaatactaacaaatactcacatttactgaaaatttcctgtcatcttttgctttgtgacagaattacagtaaaatcactgtatgctactaggattcaaaacccaactcaaagttaacaagcaacaacgactactactggcgcaacacgcaggagtagccagacacgcttggaatcaagggttagcactgtgtcaacaggtattattacataacaaactgcaaccagaagacaaaatcaaatttcccacagccatagatttacacaaatggttagtagcagccattaaatctacccatccttggtattatgaagtgtctaaatgcgcccctcaatacgcattaagatatttgtcagatgcttttaaatctttcttcaaaaaaagtaaaggctttcctaagtttaagaaaaagggtaaacatgattcttttaccttagatggtgtcataaaaattgactacagaaaggtaaaagtacccgtaattggttggataaaaacttatgaaattctccctaaaggatatcaaccgaaatctgtcaccatcagtaaacaagctgacaagtggtttatctcttggaaaatagaaatagaaacgactcaaacccagaaaaatcaggagtttgtaggagttgatttaggaataaatcatctagcaatattatcaacaggagaagtatttgatggagtaaaaagttataaaaagtatgagaaaaagttagcaagaatgcaatatttgaaccgtcataaaaaagtaggttcaaataattatagaaaagcccaaatcaaaatagcaagattacaccaaaaaatagccaacatcagaaaagatacattacacaaaattactacctatattagcaaaaaccacgcggtgatagggatagaagatttgaatgtatcagggatgttagcgaatgggaaattatcaaaagctatagctgatatgggcttttatgaatttagaaggcagctagaatataaaacacaactgtatggtagtaagttagtaattgtggatagattttatcccagtagcaaaacttgctcaacttgtggagaaaagaaatcatcactgtcattatctcaaagagtgtttaaatgtgataactgtggctttgagattgacagagatttaaacgctgcgattaatttaaaaaaagaagcggtcagattgatcgtgttagcctgtggtcagtgagcgaagtcgaactgtggactagatagtgccgacactgctagggtgaaacaggaagaaaaagccgacttttgttagcattagttagcttttttgtatcggctacaggctaataaagaaagaaattagtgcaagggttttgaagaatagattggaaaaactgtgcatttctaaaatctaaaattttcttccccatctcccctgcctcctacctcctgcctaccgttgtcctgtgacaatatatgcaactcgttgtccaatattagtagcgtgatctgccattcgctctaaacagcgaattgctagtgttaatagtagaattggctcaataatccctggaacatctcgctgggatgctaacatccgatataaattttcataagcactatctacaacatcatccaaaaatttgatacgccgaccactgacttcatctaaatctgctaaagctactaaactagttgctaacattgcttgggcttggtcagacatcagcgcaatctctgttaaacaaggatgaggtggataaggaaatattttaatggctatttccgctaaatccttggcataatctccaatacgttctaagtctcgtactaattgcataaaggcactcaaacaacgtaactcttgaggtgtaggtgcttgcagtgtcatcatggatgtacaatctgattctatttgtctatagaagtggtcaatttttttatctaatcgaggaagttcctcagctgcggttaaatcgcgattaaataaagcttgatggctcaggcgaaatgattgttctaccaaagctcccatacgcaatatatcacgctctaaacgcctaatgctgcgttcaggttcaggtcgttcaaagttgggattataaaaaacagctttcacatctttaatctcaaaattttatatattcttaactatagtcttcacttagtgggtttgccatgacttgaggcaggtgaatttgtatccaagcaccaccggtttcgggatggttcatggccttgattgtgccaccgtgggctatgataatctggcggacgatggacaaacctaaaccactaccagtaattgcggtttcactactttcaggctcatggtgtctggctttgtctcctcggtaaaatcgatcaaagacgtggggtaaatctataggcgcaaaaccaagaccagaatcaatgatattaatttccaataattgagattgatgatcgttcatcataaattcactcacagaaatcacgttaacttcaatgtgaatattagtgtgagggagggtgtatttaatacagttatctaataaattgacaaatacttggtgaatgcgggatttatcagcttggatgctgatgctttctaaaccggaataagaaagattaagattgtgatattgcgctaatggctctaaattttcccacactgagaaaatcagcgatcgcacttccaccgtttccagatgtaacaacatggtggagttagtttccatttgtgttagttctaaccaactttgcaccaaattaatcaaccggtcaacttcctgcatcaaacgcttcacccaacgattcaagggcggatctaaacggctttgcagggtttctgctaccagacgaatagaagtgaggggtgttctcagttcatgagcgagatcagaaaaagagcgatcgcgctgctgattcatatctagcaatggttggcgattttctaagaatacacccacctgtcctgctggtaaaggtaaactggtagcctccaaagccaaaggctttaactctaacatagctttagcatgatcacgggaagggtgaaaaatccattctcgcacctggggtttttgccaatcacgggtttgctcaattaattgatcaagttcataagaccttaccaactctaacagtaagcgcacctgtccaggttgccacctttgcagatgcaatatttcccgtgcttgctgattacaccataatagttgattttcctcatctacttgcaaatatcctaaaggtgcagaatcaagcagttcttggtaggtttgcaatgacaactgcaaatcttgttgctgttgcttcaccattgacatttcctgccgtaagcgggggagtacaggcaatgctattttataagaatgggagtttaaaggctggatcactcgctccaaataactattgagttgaaactgttgccaaagccaaaaaccaaggccgactgccaaacccagaagaaatcccaataagaacatttgagtcgttagttgctatttaattactcaaaactaacaactatatgcaccaattagccaaaacgatagccaaaacctctcacagtcacaatatactctggatggctgggatcttgctctaacttttcccgtaaccagcggatatgcacatctactgttttgctatcacctagaaaatcaggtccccatacctgatctaacaattgctcccgtgaccatactcgacgagcataactcataaatagttccagcaagcggaattcttttggtgataaatttacctcttttccccgcaccaacacccggcattcttgaggattcaaactaatatctttatacttgagtacgggtattgatggtaaattacttaaacgttgccgacggagcagggcgcgacatctagccaccagttcccgcatactaaatggcttggttaaatagtcatctgctcctacttctaaacccagaactcggtcagtttcactacccttagcactgagaatcaaaataggtactgagttaccttgatgacgcaataacctgcaaatatctaatccattaatttgcggtagcatcaagtctaaaattaccaaatcaaaagcagattcctctgaattggattcgcaatttctgagatactctacagcagatcggccatcattagcagtgatgacttcataaccttcttcttccaaagccataactagcatttctcggatgagttcttcatcttctactactagaatgcggctagtttgtccaagttccgctttagcagaatatttagttaattcagtggtatacattgatagcacaaggttttgagactgtactcgtcttgataattgcttaactactcatcatctacattgattgcagagtagctattttgggctgattgtattgaatatcacaactcaaatatatcataaatcacatttcctagcaatgaataagtattttcgacgactttagacatctccagaaaaaaattatggaacttatttatgggggctggtcgaagcttatgggatatctagatgtctgatttttccgttaaattatcgtttaaaaataaaggtacaaagctagatcccatgaaaaacacctaaaaaattaaggttattcagtacatagtatgcaaaatcaatctcaaaaaactgcggaaggcttaatatacataagacataatctacagatattgaatattattacaaaaattgcctctttaccctgttctctgttccctcttacccaattagtaatttagcataacaagtaccgaagaaccaaaattaatatacttgaaaaggtcataacttgcattttcatatccatatattccctttaagcaaaagctcaaattgttaccataaataataattgataattgacaattatcaattatcaattatcaattatcaattaatctattctgtctttggttttcctattccttttggtggttgtggtcttttgcttttgggggtattatttggttgcccttttgggttattttgtttggaattactgttttggttagacatgagatttatctgtaatatttagtgccgattttatctacatcagcaatatctattattcccgaaatctatcagagatattactgatgtcacctatttagggtttgctgaaaaaatgcaaaacgcagataaatcaaaagtttgaggctgataaataggaaaaaagtgcaagggttttgaagggtatacgtgaaaaagtgtgcattttttgggatttcgagagatggaaaaggaattttcaaacttcctcctgactcctgactcctgactcctgactcctatcccctcatggaaagactttctcagcaagtcctatttaagcaaagctagaaaaatccaaattgggtggaatatcttgaatacgtccaggaccaatggcttttaaagcttcatttaacaagatatccccagtatacaaagctttacccacaattacacctgtgactccttggggttctaaagataataaacttaacaaatcggtaacagaactaacaccaccagaagcgatgacgggtatagaaattgctgctgcgagttctcgtaatgcgtctaaattcggtccttgtaatgtaccatcacggttgatgtcggtgtagatgatagctgctgcacctaattcttgcatttgggtagcgagttgggtagctaaaacttccgaggtttctaaccaaccgcgtgtagcaactaaaccattacgggcatctatgccaactataatctgttggggaaattcttgacaaagttcttggactagctggggttgttcgactgccacagttcccaggataccccattgcacaccgagattaaataattgtacaacactagagcgatcgcgtaaacctccaccaacttcaatgggtactgagactacattacagatggcttcaatggctgctaggttaacgattttaccagcttttgccccatctaagtcaactaagtgtaatcttgttgcaccttggtctacccacattttcgcagtttcggcggggttttcgctgtatacttgcgattgtgcatagtcgcctttatatagtcgtacacaacgaccttctaataaatcaattgctggtattacttgcataattggtgattggtgattgggtaattaattttatgtttccccattattacctattccccattcccacaaaaagactttctcagcaaaccctaagaggttgttggaaagttacgctgacgttaacacaccctacatttactgaatctatgacttggctatacttctcactggcggcggctacctttgaatctctgcgagatgtcttgagtaaagttgtgacaaataaaggcaatcaacccttagatgagtatttagttgcgtgggcattaagggcatttactctaattatttatattccttggttgttattatcacctaacccaatacctaccatcgggaaagatttttggtgggctttgttagctgatgctactctatctactattggcggcattttatatatcagggcgttgcgttttggagatatatctttaactataccgttaatgggattttcgccgttatttttagccatcgcttctcctttaattctcaatgagtttcctgcaaaatcacaacttataggtattttattaatctgttttggtgcatattttttaaatataaagcccaaggaaaacaattatctcgcaccgttaaaatctttgataactacccaatcttctcaattaatgttaatagtagcttttctctgggctttaactacttcttttgataaaattggggcaacaaattcctcgccattatttttctcagcttctctctatttttgtacagctatcatgactttgcctattgtaatcttatgctctcctaattggttttctaagttaaaaagtaatttctataaattggttttattaggtagcttaaaagcacttgatatgtggtgtcatgtgatggcgatcgcatctacagtagcagcaaattccgtggcggtaaaacaaagcagtttattgatgactgtaggatatggctatttcctctttcatgaaaaaaatattaaacatagattcttaggttgtattattatcattgttggtgtatgtgtattaagcattttttagagtattttttagagtattttttagagtattttctagagtattttctagagcgatcgctgttttctcattggaagagggaacactgttttcacctgactattaagcgtgtcgagtaattgtaaatttttgttacaaatatcggaagctgaggttgatgctgttcatatcgcagttgcaactgttcacggaatggattatctatttgaaaagaaacacatattagatttaaacggaatactatttctgaaattttattacgaggtggtcaatgttttattacctctcaagtaattataatacatacaaccctttttcaatcgtttcttcacctagcttaacttcgatataaaaaggaacttgtgattcaatcataaaactagaccgcagggtttttcttcttgctattttctcatctatcatttctcctgatacttcataaaaaactaaaattttcatatttgcaggtaatttatcatcagtattagtggtacatacttgtaaagttagactatataaaccatgatctttagttgcttccgtctcttcttttttaattttcaaaagtagaggtatattgatttgactgatattaataactttaccgatttcgttttcctcattatctctgcttctgcgttgaaatgctaaattctgctttctctgaagatttttttgatttaggaaatttcttggaacatcccaacccacgggaaaattccttttatcaaacttaccagataaagaaacgatattgttccgttgattatctctattttcatccgtatccaacatttcaatactttgaatagtatctgatttaacatcagtaattataatggtatctcctgaatattcccttaaaatagcttgcagattcactttatcaacagaattaatatcaccgtctaaagtaataactaattttgttattttagtctcactatctataacagttatttcacgattaagtgttggcattgttatttcctcctggttagttttagaggtacagcaataatgtgatgatatctcaacagattgttctgttgtcacaaaatcttgccaattcaattttaaagcttcacatattcttttcaaagaatcaatttgaatagatttaccctgaaaaaagttggtaactgtatttcgagatatcaattgagactcagcaaaattagattttgactcaaatcccagcttaattaaagttgtttctgcctgttttatcaactcaggagcagccgcaatagtcattcttttcttttttatcatcatgaaggagtatcgtacagttgtatttaattatttcaggacttacgcaaaagggaacgaaagtaggggtaattcatgaattacccctaggcaagaataaggttttcagtcacatcttgcgtaagtcctatatttaattatttaattatttaatcacaattaagtatagggcaatcataaaacaaacaaaacatcatcacagctaagacagtaggtgagatttctgattttacagtgaaataattaaacatccgcaaaatcactttatgctaaatactttttcaacccacaggatttttggatttctactcactgctttaatgctcacttcctgtagtggaggtacgtctagtaatactgatactggtacaaatcaagctcaaaataacagtggtggtggtaatactcctcaaggtcaaactttaacggttagtattccttcattacgcaaaagttatacaataataaagggacaaacaacagtagaggatatagctagtgtagtttctttagatagaaataattgtagaggtgtatttgccataggttcacgttcttatgctaattgtacatctgaggtcatgtcagctgctcgacaggcacttaattttattggtagttgatacaaaacatccaaatttataaataacaaaccgattttatcaagtcgtaggttgggtagagcgatagcgaaacccaacatttccaaaaataagatgaatacgcgcaccacaaaatttttatcattaatatctgtatatcaaaatttcctcaaccgctataactacataaccagcaaaataataaatgaaaaaaataaatattgttactcaattatcattattagaacgatatttaatttctgaaattcttcccattttattatttaatattgttattgttaccgtagtgacagaatcaattggtatatcatttgagcaatttaacctactacttaataaacacatatcttttgaaaatttaatatatttgcatattcttaaactgcctgattttattgttattgctgtaccaatttctatgttaatgacaacaattttagtttacaataaattatcaaataccagtgaaattattgctttacaaagctgtggagtgagtttatataaattgctatctccagttattaaccttagtattattattggattaatattatttattggcaatgattttattgttcctgctactaactataaagccgctattaccctagaatcattgatgaatatcaaccgagaaagtctaaaaaatgatgatattatatatcaagaattagcaacaataaatgagccgaaaatatcaaataaaaataactatcttaaatacttgttttatgcagaaaaattcagcaatggtaaaatgagcaacgttactttattaattagagacatccaaggattaaaagtaattataaactctaaatttgctgcattgtatgaccacaacaaatatttttatttttatgatggtgtaaaaagtataattaatcgagatggtgcttatggtgaagcaattaaatttgaacaattgatcattgagttacctaatatatctcagcaatttcaactagatagagaaaagttagatgatagagaaatgaatatttttcagatataccaacgattattaattggggaaaaattaggagatatgactaaaataattcagttaaatgttaatctatttaaacgatttaatttacctatttcttgcattgttttcactttattaggatcgtcaataggaattaatttacaaccaagaattaaatatagtagttttagttttactttgctaattattggaacaatcaaaatatttgaggctgtgataaatgctttaatactatcagaacatatttcaagttttgctattttcataccaaatatatttgctactggtgtgagcttttatctattactaaaaaaaattagttaacttggtaggttggtttcaataataaaactcaacgtactgctcattagtttagcaaacgttgaaattcagtgcatttatagcatatctgtggaaaaaattgaaaaatttttcatgctctgatagaatttagctggttaatttgattttttttcaacaatgaaagctgatcaatgttgggtttcctaaagtcaacccaacctacatctacatacccaatttactcagcatgattaggtaaattatgaggatcaactccttgcgatcgcaaataagccattaacctttctttctccttacgttctttttcaatcatttccagcgcccaaggtaacaaattacctgtttgatcccaccatcgcaaccaatagccagtacggccttcttttgcaccttgccaagttcctaaaaatagacccattgactcaatccaatgacgaccattttcgtctggttgtttcaattcataacgtccattttccagttgataatattctaataatcctccatctggttcaaaaatgatataaataggaacgtgcaaaatctgttcataaaaaaaccattttcccggcggataggtacgtttaaatgaatattccccgccgtctttatctgacaaaaattccataaccacagccggtatatccccttctaaatggggtgtatagcttttccgtcctggcaatatttctttaactgaaggtatatatagccaatctggtgctttggcgataaattgattatttaatgtggcacataaagcaaaattaacagcaattaacatctgtggttgaataaaaccactgatttctaaactttcacacaaagcacctgctaaaagtggttgtcctgtattgtccactggttcatcctctagttgataaccatcgggtaacgcttcccatgagataaccagtcccgtctgtgatttactttcactgagtagggttgccataaaagttacctttacttgatttatttttattctatcatctgaatttcatctattattattttcgtagtgaggacttcagtcctcaaaggaggaataaattcctcactacagttaactattcagctaaaaactctcctaaacttggaacatctacccacattttagaatcatttgattgatgagacaaatccatcaataattgagaataaaccccttctttcaaagatggtataatctcttgtttgctttcaattcctgtcacccattgatctacaactcttaaaaatgcacaaattcgaccatcagcataatgttgaggaaataataattgttgaggaatttccatttctgttaaacttcccccaacttgagaaccccaaattttaaacccgtgaatataatctttttgttcttcacttcctaaaactaatgttcctttatctccataaacttctatccaatggggtcggggtgcatgaactactgcactaatagcaatttgacatggtataccatttgtcaattccaaagatatcaaacaattatcatctgtattcactgcttttaattcaccattttcagaatcaattctttgggaaatagctgtattaaaataagcatttaatttcctaactggtccaaataaccagttaatataatcaaaagcatgagaacctaaagaacccaataccccaccaccttgatctttgcgagaataccaattataaggacgggatgtatcagcacgagaagaacctaaccagtcaatttttattaaccgaatatttcccacataatttgtatttaacaactgctgaaaatattgccatgcaggaataaagcgaaattcaaaatctactgtggcaatgacatttttagcttttgctaattgatataattctttagcttcatttgcgtttaaagttacaggtttttctaataacagatgtttaccagcttctaatacctgtttccccattttataatgtaaaaacggcggtgtggaaatactcacagcgtctacttctggtaaattgataatttcagtgaagttatcactaaaatgaggaacattattattttctgcaatgatttttgctttgttgatatctcgatgataaaccgcagttattttggttttgtgatgtgcttgaaatgcgggaatatgtactttttgaccaaaaccagtaccaacaattgcaaccccaatcatattgtatctttgatttatttgctaaatttaccttttagtattatactaaatattgcagaagtgttgaatgttaagattttgaggattttgtccaagttgtgcattggtattggtgataccaaatttgagcaattaatgactctattctcaatagacaatggattttacctgggtaaaacgaaaagattgtaaagttttattgcaggattcaacacttgtgtaaatattgatactattaattgttttaaataaaatccaatttcttatctatggatttagtatgatgaatgaaaaacaaactatcaatccttggaattataaaccttggtggtgtcaaccctggtcaattatcctcacaggtatcacattaattagcggtagttggttaatactcaaacttatatggttgacaattattgttgctatccctatattaagttggatgggtttctttttattaatctggccaaaattaatgattgaaagcggcattttagaccaaaaaagtaatgattaatgagtaatcatcaattacccattacccattaattacccattacccattacccagtccccagttaccctccatgactgcggggatcatcttgactatttgttgatactggggcggaaaatttggaagttttaccactcatttgcgcgtagggtaggggagaaccatttaccaaagcttctaagttgctggccatgatggaacggggtatgtcaccaatagcttcggctataccttctccttgtttacccaaaaatacaaagtgaggaataccatctactcgatatttgagcatttctggcaaccatttgttattatctacattcagcatgacaaagtttaatttgtctgcatattgttgtttgagttcggctatgtcgggtgccattttttggcagactgtacaccaatctgcataaaattctactaaactgggtttattattgctaactgcaacttctaagggtgtggatgcagcatctagttcggtgagagaaactgaggttgtctgggttcgcagtcccaaaaatagggcagcactcagggcgatcgctacaataacaatgaggaagtttctcaaacgcttgcccaatgtagattcaggcttggtaggagcattaaatggtgcatctgtactcataatttatttattaagacttattaagcagtttcatcatctagtttagcaaaacttagttttttacccatgaaaaaacgagtcaccctgacttttcctaaacgtgcaattcaaatgcctgtcacttaccgactggcaaaagattttaatgttgcggcgaatattatccgcgctcaggtggcccctaatcaaattggtaaactggtagtagaattattgggagatattgatcaggtagatgcagctattgagtggatgagatcgcaacacatcagtgtttcccataatttaggtgaaattgtcattgatgatgatctatgcgttgactgtggtttgtgtactggagtttgtccaacggaagctctttctctcaacccagatacatatcaacttacatttacgcgatcgcgttgtattgtctgtgaacaatgtattcccacttgtccggtacaggctatttctaccaatctttaaaatctttaaaaatgagattatctgaataattacatatcaaataactagcagccaatgttgttaaaaagtctataaaataatagatttcaatttttcgctactgctatgatgcaaaaatatgatgagatagtgaattgatataacctatgaacttagccacaacacccacagtcaaaagtctaggagattgtgcatatcaagcaatcgaaaaacactttcacaaaaccataaaatgggaaaaatcagttaaaaaagacgaagatccagaagcactacaccaaatgcgtgtgggaatgcgtcgtttacgtacagcagttagtcggtttgagctatgtttaaatttacccaaatcagccagcgataaaaatattggtaaaattgccagaatactaggaaatctccgagatttggatgtcttaaaagagatactggaaaataattataaaccacatttactttctaaggaacaagcatctttagagatagctttttctactttagccaaacaacgggaagttgctttttcccaggtgcaaaaaatattgaaagatgaaacttataaatctttgaaaaatcattttcaacaatggttagaaaagcctagttatcaaccattagcacatttgccaattcagcaagtgctaccagatttactgttacctgaagtcagtaaattattattgcatccaggatggatggttgctactcaagttgtaaactcagaagtagttgtacaaagcaattggacaccggaagagttagaaaaaaatctgaaaaatcaagggaaaattcttcatgatttgcgaaaacaagctaaaagagttcgctatcaaatggaattatttactgatttatacggtgaagcttttaccacacatatttcacaggtaaaaagtatccaagaaattttgggaatgctacaagatagcatggttttaaatgagtggctggaaaatatctttaagtcagaaattaacgagcaaataagtggtctaataactttattagctgtaaatcgttaccaattatggcagcagtggcaaccactacaacagcaatatttaaaactagaaacaagacagaatttatatctaacaatattgccatctttatcaattgataattgataattgataattgacaattgataattattaattattaattatcaactatcaactctcaattgttcattaacctattaatttctgccaagttgcaggaccaacaatgccatcagcagttaaaccattttgctgttgaaatctcttaattgccgcttctgtattgcgaccataaataccatctgcaacagtacctacacgatgttgtatatatctcattactgctcctgtggtttgatttccttgcactaatcgttttgataatatctgattaatggcattccatgtagtgctagttgccattccactgggaataattcccacaattctttgaaacttctctacagcagaagttgtggcaggtccaatgatattatcctcatccaaacgcctattatttctatcagttatttgcagtcgatttaaagcttgttgcaatctgagaacagagatatctgtattttgttcctcatctcctactaagtttacaggagaagataccactttaccagttaaccctgtaacaatagcattggccattgcttccccatcataaagttgcatatctttcgcggaatcaataaagcaacattctatgagaatacctggcatatttgtatttctaatcacgtacaggtgagaaccattcttgacaccgcgattaaaaaatcctaacttgataatttcatctaatactggttgggcgatttttctcccagcatcactcatagcaaatacttctgttccattagcttgcccattaaaggcattaaaatgaatagaaacaaaaacatcaactttgtttctattagctatatcacaacgtctacccagagattgactgactgttctggcactatttggtgtacaagatattgcttcatgacctaagctttttaacttagctataactttatttcccacctccatagttaagttatcttcaaatttaatacctcttgctcccgtatctggaggacaattatgtcccatatcaattccaaatttcatggtgtatcctcaacgtactttcaacagaaaagatttaattaagaaaatgggcttgtttgggattttttctagtcaaaaaccagaattatgatatcacatattataattgctcaaaatcgacagcaactagatatttatgtaatcacaatgtaacttgtaaatttccaaatacagggaaaaaaggaaatatatctcaccttcagcctcaatgggcaaatgagatattctactctttaggtagatattcccccattagtccgcaacaatgtttaagatcaaagtaaagaaagatttcgtaactgagtgacatgaaacgtattgtcttaattgctggttttgaatcgtttaacgctgatttgtaccgaaaagcggcttttttggctgtttctcgctgtcctgagttagatattcgcgtttttagcgatcgcaatattaccaccaacccagaagaggtacaagccgcacttcaaggtgctgatgtatttttcggtagtttaatatttgactatgaccaagttttatggttaagagaacatattgctaatattcccatccggcttatttttgaatcagcactagaattaatgagtttaacgaaaataggggtgttttctatcggtgataaacctaaaggaatgcctaaacctgttaaattcatactcgataaattcagtaatggtaaagaagaagacaaactcgcaggttatataagtttcttaaaaattggacccaagctattaaaattcgtaccagtacaaaaagtccaagacctccgcaactggctcattatctacggttactggaacgcaggaggaacagaaaatgtagcagctttattttggacacttgcggaaaaatacttatctttacaagtcggtgacattcctgcacctatcgaaacccccaacatgggtttattacatccagattatcaaggttattttacatcacctaaagcatatttggagtggtatgaaaaaaggagtcaggagtcaggagtcaggagtcaggagaaagaaaagaataaaattacccagtcaccagtcaccagtccccagtccccagttatcggaattttactttatagaaagcacgtcattacaaaacagaattatatcccccaattaatcagaaaatttgaagattcgggtttaatacctttaccaatttttattaacggagttgaaggtcatgttgctgtgcgtgactggatgacaaccgactatgaaacccaacaaagacaacaaggaaatattgaaactccttccctttcttcagcagcagtcaaagttgatgcgatcatttctacaattgggtttcctttagttggtggacctgcgggttcaatggaagcgggaagacaaatagaagttgcacaacgcattttaactgctaaaaatattccctatattgtcgctgcacctttattaattcaagatattcattcatggactcgtcaaggaattggcggtttacaaagtgtagttttatatgcacttcctgaattagatggggcaattgatactatacctttaggtggtttagttggtgaagatatttatttagttccagaaagagtacaaaggttaattgatagagttaaaaattgggtttccttacgtcaaaaattagcatcagaaagaaaaattgccataattttatatggttttcctcctggttatggtgctgtaggaactgctgctttattaaatgttcctcgcagtttaattaaattacttcatgcacttaaagaacaaggttatacagtagggaaaattcctgaagatggagaggaattaattaaacaagtaaaagcaatagatgaagaaatggaaacctgggaaaaagataaacctttccccacagatgctaatactgtcaatgctagaaaattagaaaaatggttaggatatctccgcacttctaaaattgaaaaacaatggaaatctttaacaggtgcaggaattaaaacctatggcgatgaattacatcttgggggtgtaaaattaggaaatgtttggatcggtgttcagccacctttaggaatacaaggcgacccgatgcggttaatgtttgaacgagatttaactccccatcctcaatatgctgctttttataagtggttacaaaatgaatttcaagctgatgcaattgtccattttggaatgcacggaactgtggaatggttgccgggttcacctttaggaaatactggttattcttggtcggatatattattaggaaatctaccgaatttatatatctatgctgctaataatccttcagaatcaattttagctaaacgtcgtggttatggggttttaatttctcataatgtgccgccttatggacgggcgggtttatataaggagttggtaagtttacgggatttaatagcagaatatcgggaagatccaaagaagaattatgtgctaaaagaaggtatttgtaagaaaattgttgatactggtttggatgttgattgtccttttgatgatgcgaaaaaattgggtattgcttttacgccggaaaatgtcaggatgtttagtggtcatgctttcgatgattatttggtgaagttgtatgagtatttgcaggtgttagaaaatcggttgttttcttctggtttacatactttaggtgaagcgccaagtgaggaggagttaaagggttatttggatgctttttttggagaagaaaacgaaccacgaaggcacgaaggacacgaagaaagaagagaagaagaagagaaaataattacaagtttgttgaatcaatctactgatgagttgacgaatcttttgcggggtttaaatggtgagtttattcctcctgcaccgggtggagatttgttgagggatggggcgggtgtgttacctactgggagaaatattcacgctttagatccttatagaatgccttctcctgctgcttatgaaagaggtagggaaattgcacggaagattattgatcagcatttagcagaacatcagaaatatcctgaaactgtggcggttttattgtggggtttggatgctattaaaactaagggtgaatctcttggtattctgttagaattggttggtgctgaacctgtgaaggagggaacgggaaggatagtaagatatgatttaaaacctctttctgcggtgggacatccgcgcattgatgtgttaggaaatctatctggtattttccgtgatagttttgtgaatattattgaattattggatgatttgtttcttcgtgctgcggaagttgatgaaccggaagaacagaattttattagaaaacacgctttagaattaaaagcgcaaggtgtggaaaattcctcagcaagattgttttctaacccctctggcgattttggttctttggttaatgatagagtggttgatggtaattgggaaaatggcgaggagttgggtaaaacttgggaaagtcgcaatgtttttagttatggaaggaaggataaaggacaagctagaccggaggttttgcagacattattaaaaacgagcgatcgcattgttcaagaaatagattctgttgaatatggtttaactgatattcaggaatattacgctaatactggaggtttaaaaaaagcggctgaacaacaaagcgggaaaaaagttacagctagttttgtggaaagtttttctaaggataccacccctagaaatttagatgatttgttaagaatggagtaccgaactaagttattaaatcctaaatgggcggaagcaatggctaaccaaggttctggtggtgcttttgaaatttcccaacgaatgacggctttaataggttggggtggaactgctgattttcgagatcattgggtttatgaacaagctgcggatacttatgctttagatgcagaaatggcggaaaagttacgcaaagcaaacccggaagcttttagaaatattgttagtagaatgttggaagcacacgggcgcggtttatggaatgctgatggtaataggttggaaaaattgcgtcagttgtatgaattgagtgatgaacaattagaaggtgtgacagtttagaaaattcaagattcaaattttaaactgtaggttgggttaagcatcgcgcaacccaacacatttacagtacaattaaattgataaatcaaataaaaacatcatgaaatttatcattactatgtttcaagatgaagatgggatgtttattgttgaatgtccctctattcctggttgtgtcagtcaaggaataactgaagcagaagcacaggaaaacattcaagaagctattagggaatgtttagaagttaggttagaaaaagggatgcctttaacagtaataactcgtgaagtggaagtatataggggttgctgagaaagtctttccgtgagggcataggagtcaggagtcaggagtcaggagtcaggaggagatttgaaaatttctttgccatctcttgaaatcccaaaaaatgcacactttttccggtatacccttcaaaacccttgcactaatttctgtgtttatcagcctctaacctttgatatatcaaggttttaggtttattcagcaaaccctatatatataatgctatctgtaccaatattaaaacctgcggaggttattaaaacttttacaaaacttggctgggaagtttctcgtcaacgcggaagtcatattattatgaccaaagaaggacatccagctactctttctatacctaatcataatcaagtagcacggggtactttacgcagtcttattgctaaagcaggaataacagtagaagaatttatgaatgttttagaaaattaaaattataatcgtaggttggattaagcaacgcgcaacccaaccaaatgttttatctaacaatcagttgactttaatctagggttcaaatttgtaattcaaaccctggtaaaacatcttctccagaaagtacagcagaaagttggacaatttctacaggttttccacttctataaatttctacttctttatcctgtgggttaattaaccaacccaaacgcaaaccattatctatatattcctgcattttttcttgcagagttttcaatctatcggtttctgatctcagttcaatgataaagtctggtgtaagtgggggaaatttctttcgttcttcttctgttaatgcttcccagcgttctaattttatccaagcaacatcaggtgaacgttttgcaccattgggaagtcggaatattgttgaggaactaaatactatccctaattttgtttggtaattccacagactgactttaaaatttaagtcggcttcactacggccgctttctcctcctactggtggcacaataattaactctccttctgcatttagttctaagcttacatctttattggccatacagagttggtaaaattgttcatctgtaaggcgaataattggatctaggtttaaggtgactgtgttcatttaactactgttagcctttaagtaatatgttttttttgatgtaaaaacttcaagtagattttttccgttctcattaggacttacgtaagatgactaaaaaccttattcttgcgtaggggtaattcatgtagcttgtttcccgaagggtattacccctactttcgttctcttttgcgtaagtcctgctaattttaaagggttatgcggataccttttgatccaccatataggttaatctgctttttatgtatacttaatacatcctttttatgaatgaatttaggattatgccagttttctatacacataatcccatttttttgtagatgctaaagaaatcagcatagcttctgattcttggggggtgatatttcctaagttaaaagcattaatttcttgttctgtgaaaatttttgtctttaaaccagctttgataagcgactgtagtaaatgttttaaagattccctaataatggacaatttataaaaatctttatctacaatatctacattttctattttagattgattaaattgttctacaatattgatagttattattttaaagacttcttgattttttgtaattaagtataaatcaaagtctataaattctatatctatactttctttcattataaaataatactttacatacagtaaccaaggtaattcacccttggttgatttttcacaaattacctgatatagtttgcttttcttaaccaacttttcaattaacttttctaattcctcctttagttgaataacagatatttgtcgaagattagcaaattcaatcatttctgccattttttcatcttgcgggttaggatcatttaagcatctttccagaacttctatcctttcccggatgctatcaataatctcttgggggaatgtaaagctgtataccataccttatctacctttatggtgacattatgtgccttcctaaaactattttaactcaaaaatacataatcttgagtcctaaaatcagtattttgacaaaattggcaataaaccgactataataaaagataaaattatgtaataaacacattaaatatatgatcgcaaatcacgatatttacatcactcccgaacaatatttagcactggaagaaaaaagccccgtcaaacatgaatacatcaacggttacatctacgcaatggctggtgcgtcagatcctcatattacagtaacaggtaatatttttactctcattcggaatcacattcgtggtagtggatgtcgagttttttttactgacatgaaaaccagaatagaaaccatcaatcgtttttactatcctgatgtgatggttacttgtgatgaaagagataaaggattattaaattataaaaaattcccctgtttaataattgaaatattatctgattctacagaagcatttgatcggggtgataaatttaaagactatcaaaatatcgaaactttacaagaatacgttttaattgatgtcaaaaaacctcaagtagattgttttcggtgtaatgatcaaggtttatgggtattacaatcttatacacaatcatcttttgaactgcaaagtattaattttcagggaaatatgaatgatttatatgaagatgtaagttttttatagtagatacctacctagcgagattttccactaccttcaatctaccttaaccccaaaatacaagcgtataacttaaatccttgctaaactaaatttacaaatgttcataatcatagataaaaatcaatcataatatatgatttcaactaatacaccctctaaacctagacaaaattccgcatttaaacacctcatgtctatccattggtggatgtcaattggttatttaatcctatttttaactggtacaattatgtccaggttgccaagagaggtttttattcgtccttctctttacgattttcacaaatcaattggtgctttaacaatggccattctcacttggcgaattttagtattgttgcgggtttggtggcgtaaatatacaaaaagatttcctcaatttactcccgaatggttaaaaactgtcgcccttcataccagtttgtatatctttatgtgggttgttcctgttacgggtttcttactttctaattcttttaaaagtaataatgttaaagtttttggtattctgttacctgatatgtttccccaaaattcggcaatggtggaagtcggtagaagtttacatttttggttagcttacacatttttggtttttattattttacactcaattcaacaaaaaaaagtagtgcgatcgctttggcgtaaatttaccaaaactatcacacttgggaataatttatctagtaactaatgacgcaagttttctgagttttacaattatcagttatcagtgagaataggggataggaaggaaggaaagcaactcctgactcttgactccttacataattagctgattattgttcatgttcctgttgattattatgtatcgtgttatctgcttccaataacctagacataaatacatctggttttctactcattacagatatcactttatcaatagcaatgacttcactgattttcaccaccatttcccacaaagtatcttcttctgtctctttgttgtgcgttctgtgtttaaaccacaataagtcatctacaaccccgataattgttgccaaataccatttatctctgattaacaaccatatctctttctctatgtaggtttgcagaatagatttcatgatggtttagataacaaaaacttattgcgctacatagtatgctgatgagacagaaaacgcaatagtatatttacttatcttttcgtattaaaaataacgtttatgtgttaacaaaaatatgtatattttgaaacacttactgattagatttagtccagaagttgagaaaaatcccatatttattctttgttaagaattatcaactatcaactatcaactgtcaactatccaacttacttagtaattgccgaattacattagcatcttcggcttcaggaactttagttaaataaatttgcagatcctctactgcttgggtaaagtaaccaagttgataataaagcaaacctctgtctcttaattctaaactcacaccaggaaacaacaacaaaattctttctaccacagatagggttttttctaaatcttggcgatttaaataaatatacttcaaatttgtcagcatcctcgccaaaaactgccgcttactaaccacagctaaaaattctggttgtaatgtcaccgattgctgataaatttgagatagtctttcttgacagtcttgaggaaacatcacctcaccaccattaaaagcatccacaaaaatctcaatgtctgcaatatcgggacggattaaaaaatgtccaggcattcctatgcccaccattggaaagtcaatgcgttttcctacctccatgtaaactaacgctaaagtaataggaatcccggttttgcgttctatgacatcattaaaaaaactattacgcggatcataataatcaattttattacctgtaaaacctaattcatcgtataaatactggtttatactttgaatcatccgcagcggatagcgggaagatggtaaacgctcctctaaatctgttgccattatatctagggcgtttaagtattcttctggatcaagattgggatattcttcctgggcgatatataaagcagccctggccaggttgatagactcgtcaggttgctggatttcttggtaaaaatattgacgtgctgacgagaagttcataagcagtaggtatgaggcgacatactcttattttaaggcatttgaggcagttgggagcgatcggatctcaaaatcgtatttttaccagttgtttcattagacatctccagaaaagaaattatggaacttatttatgggggcagggcgaagcttatgggatatctagatgtctgatttttccgttaaattatcgccctgtaagggcgaagcattcggaaaatatcctttggtgaataccgatcattaatcgctcgaatgcttcgcccctacttcgcccctacaacttatgacaaattaatacattctattgtggagatgtctattaattgatcatgtatgatcaacatataccaaatatactaaaataagatctttgtctagttctccacatctgtcaacttatgaaattacctgatttaaacactgaaactatagatcgtattatcgaaatggcttgggaagatagaaccccatttgaagctatagaagcacaatttggacttttagaaaagcaggtaatagccttgatgagaagagaaatgaaatcttctagtttccagatgtggagagaaagagttactcaacgcaaaaccaaacatctgcaaaagcgagaatttattgcaggtaggtttaaatcccaaaatcaaagaacatgaaatacagcttaaaaaaagggggggtgatctacattatcccatctttttcttaactgggttctagtaccatcgatccattgataacgataggtttctgtaatacattgatctccctgtactttaaaaaattccaccacttctaaaaagtcaccattcgttaaattcaatcttgcccgaaaataaccttgatcagataatgctctttctttgacaatctcaattttatcaattatcgaactggtaattagtttagcttttatttctgtaaaataatcctcaacaatcatattcaaattaagattgaagtaacgctaaacgactttgtaaatcagaccacatttgataaaaagcactccattccacaaaatcaacttcatctcctaatttaccagctttaaattgttgataaactgttacacagctaaattgtataatcctaatattctgaactcttgtttaacagacaagatgcctgttccacttatacaaattaaatgcacaacagcttaaaactccacagatgataattgataacgctgctcaaatacttgcaaatcgctttctaattctctgatttgctgttgaatatgttctctttcttgatgaataatctttctgagtgatgaagctaaaatatcactatatcctccttgttgagaaagtgcttctaggacttttaattgattgattatttctgcttgagttgtcatgattacttttaattcctgattactgattaataaaactttactaattctatgataatatatcaatttagcattgtttgtacccgtacccacatcgcagacttctctaataagcaggggatataatttagtatattttatcgtatattagcatttgttagcatctatcagcatttagttttaataatgaatttaaggaaaagatgggatcattcagtgctaacctaaaagatgatattgcttgatcttaggtctttgaagaccaactctgaaaaatagcttcattcattaggcgcagcatggtcaccaccgcagaaaaaacaaacataggttacattacccaagtaattggtccggttgtagacgttaagttccccggcggtaaattaccccaaatctacaacgctttgaccatcaaaggcactaacgaagctggacaagaaatcaacctcaccgttgaagtacagcagcttttaggcgataaccaagttagagccgttgcgatgagcagcaccgacggtttaacccgtggtttagaagttgttgacaccggcgcacccatcagcgtacccgtaggtaaagctacattaggacgtatttttaacgttttaggcgaacctgtagataatcaaggtcctgtaaacaacagcgaaaccttacctattcaccgcgaagcccccaaactcacagaattggaaaccaagccttctgtgtttgaaaccgggatcaaggttgtggacttgttaactccctaccgtcgtggtggtaaaatcggtctgttcggcggtgctggtgttggtaaaaccgtgatcatgatggaattgatcaacaacatcgctactcaacacggtggtgtgtctgtattcgctggtgtaggtgaaagaacccgcgaaggtaatgacctctacaacgaaatgatcgaatctggggttattaacaaagataacctcaacgaatctaaaattgctctagtatatggtcaaatgaacgaaccaccgggagctagaatgcgggttggtttgtctggtttgacaatggctgaatacttccgtgatgtgaacaagcaagacgtactgttgtttgttgacaacattttccggttcgtacaagctggttctgaagtatctgcgctgttgggacggatgccttctgcggtaggatatcagcccactcttggtactgacgtaggtgcgctacaagagcgtattacctccacaaccgaaggttctattacttctattcaagctgtatatgtacctgcggacgacttgaccgaccccgcacccgctacaaccttcgctcacttggacggtacaacagtattgtctcgtggtttggcagctaaaggtatttaccctgcggtagatcctctgggttctacttccacaatgttgcaacccaatattgtaggtaaagaacactatgatactgcacgtgctgttcagtctaccttacaacgttacaaagaattacaagacatcattgctatcttaggtctagatgaattgtctgaagaagaccgtctcaccgtagcacgcgctcgtaagattgagcgtttcttgtctcagcccttcttcgtagcagaagtatttaccggttctcctggtaaatatgtgaaattggaagacaccatcaaaggtttccaaagaattttatctggtgaattggatgatctgccagagcaagctttctacttggtaggcgatatcaacgaagcgatcgctaaagcccaaaagctcaaaggttaataggtaatgggtaataggtaatgggtaataggtaatgggtaatgggtaagaaattctcccaactaccaattaccaattaccaattaccaatcaccaatcaccaatcaccaataattaagtagaaactaaaagaatatgactctgaccgttcgtgtaatttccccagacaaaactgtttgggatgctcccgctgatgaagtaattttacctagcactactggtcagttgggtgttttaagtggacacgctcccatgttgacagcattggatacaggtgtaatgcgggttcgtgccaacaaaactgctaactggcaagcgatcgcccttttgggtggttttgctgaagttgatgaagatgaagttaccgttctagtaaatggtgctgaacgtggggacgctattaatttagaagaagcccgcacagctttcaaccaagcacaaaccaaattaaaccaagttcccgcaggggatagacaagctcaaatccaagccactcaagcctttaaacgcgctcgcgctcgttttcaagctgctggcggtttggtgtaactcaatcctgaaatggacgataaatagggtaggcaattagcctacccttgtttattgtttgattatgatgtttaaaaatataatgttaagtttgtaaccgtattctcgtcttgacacccggtgatgatcatctgattgtttgatcattttccaccaatgttatcaggatatcagccagctttttatttagatgatgaatcagataataaaaaagatgctaagaaagatatattacgagatgaaaaatcacgcgatcgctttctatttaaaatcttatgtttgtcaagctgcaacaatcgcaatacgatctttctgatgatttttcactttttaagcgatcaagtaatgaactctatcgcgtgcttcaaattctaaaatccttccataatctataaataatgaatttgaacacggattaaatggggtttagaatttaaaaggctgatacgaacataaaacatctgaacacggattacacagattttaattacctttaattatcaaatactgtaacagataacttaatccgtgcaatctgcgtaatccatctaatccgtcgataaaagctagtaaggttttgcagaattaccaaaggttatttcccccatgccaacaaaaaaacagatccccggtttcttcaagaaacaggggatctaaatcacctaaatcatctaaatcatctaataattacccttaaccagcagctaccatttctttttccagacgttccaatctttcagccaataattgctctaaagtaattaaagccttagtgaaaccatcaataccttcagaaagtttatcagatgccatccggtcagcagcgtgcatcttatcaaaggtcgctttatcaacagagattttttcaatagataaacctgcaactttagcaggatcaagtttgcggggtaactcacccacagtattttgcaattctgataataaaccaggagaaatagttaacaaatcacaaccagctaactctgtaatttcgccaatgttacggaaactagcacccataacttcagttttataaccaaactttttgtagtagttataaatcttggttacagacaatacaccggggtcttctgcggaaggatagctgtcccgtccggtatcttttttataccagtcaagaatacgacccacaaaaggagaaatcagagtgacaccagcttcagcacaggcgatcgcttggtgaacaccaaacaacaaagttaagttacagtgaataccttctttttccaaaatttccgcagccttgataccttcccaagtcgcagcaattttaattaaaacccgttccttagaaatacccgcagctttatattgagcaatcaaatctctagctttagccactgtagcatcagtatcataggataaccgtgcatctacttcagtagaaacacgaccggggataatttgcagaattttcaaaccaaaagaaaccgccaaacggtcaaaagctaaagaaactacctcggcttgggtagccttagtaccagcatcttttttcgctttaattaaagtttggtcaacaatatcttgatattccggcatttgtgccgccgcagtaatcaaagaaggattggtagtagcgtcctggggtttaaacttttcaattgcttggatatctccagtatccgccacaacaacggttacttcccgcaactgttccagtaaatttttagccataacatactccgtaaatttttttggtgtaggatttaccaatccccaattatttaaactctttgattttgcatacgattctgattttggcaacttttcttaataattgcctaaccttactttactaaatcattcctctcaggtgtgcagttgccaactttttttgatttattaaccgcaaagtacgcaaagtacacaaaggaagagaaggaatgaagttgagaatttttgagcaggaagagaaaagttccagcctcagccctattttaaacgtctcaagctgtaataggctgtccaatagaatgcactttgattaaactggttgttcctgacataccaattggtactccagaggtaattacaactttgtcacctttttgcacaaaaccattttctaccactgtgttaaccacattggtaaacatctcctctgcatgatgaacagggttgattaacaaaggttctacaccccaagataaagccaactgacgataggcaatgggttcagaagtcagggtaataattggtgtcagaggacgatatttagaaatcaatctagccgtatttccagaagttgtattacaaagaatcgccttagcacctgtttcataagcaatgcgacaaaccgcttgggcaactgattctgtaacactcagacgaccggcttcatgattccaggtatgtttagcacccgctggcaatgctttttccgtttgcaaagcgatattgtgcattgtttgtaccgccgcaatgggatattcacccacggcagtttctcccgacaacatcaccgcatctgtaccatccaaaatggaattagccacatccgttgcttcggcgcgagtggggtcaggggcgctaatcatcgactctaacatctgcgtagctgtaatcacaggcttacccatcaaattacagagacgagtgatatctttttgaattaatggcacttggtgaataggcatttctactcccaaatcaccacgggcaatcataatcgcatcagcaacttgtaggatgtcatttaactgggcgacagcttctgggcgttcaattttggcaatcagacggattttagaaccagcggcttcaatcatgcgttttgccggttctaggtcttggggcgatcgcacaaaagaaaccgctacccagtctacacccaattgaatcccaaaccgtaaatcctgcaaatccttttctgtaatggaactcacaggtaaaggagtagcaggtaaatttacacccttatgagaagaaatcaaccccccaatatccacatgagcgcgaattttatcagcatcacgactggttacagttaatttcacccgaccatcattaatcataactggttcaccaggtcggatcattgcaaataaagtaggtagaggtaggggaagttcatcaatattttcccccttttcctgtaacagaaaagtcacctcactcccagcttccagcatcaaaccttccggtggtaacttccccaaacgaattttcggaccacacaaatcctgcataatcgcaacaggtctttttaactcatcactaatgcgtcgtaaatggtgaaaagtttgagcgtgagcttcataagcaccatgcgagaaattcaaccgagccatattcattcccgcttccaccaaagcttgcagcttttccggtgcagcagtagcaggaccaacagtacagataatcttggttcgacgcatcataaaaagtagggggtaacggtctaggtagtgcaacctcgttaagcccatactggggactggggattggtgattagtgactggtgactgggaagagatggggaggtagggaggcagagaaattttagattttagattttagattttagattggagataacaaaaacaatccaaaatccaaaatagcccaatccccaatcaccagtcaccagtccccaatcacctatttgccattgacaacatcaaatcaacaacacggttagagtaaccccattcgttgtcataccaagagacaactttaaagaagttagaatttaattcaattcctgcacctgcatcaaaaatgctagagtgggcatcaccttgaaaatctgtagaaactacttcttcatcggtataacccaaaatacctgctaactcaccctcagcagcttttttcattgctgcacaaatttctttgtaacttgtagatttgacagttttgaaagttaagtcaactaccgaaacatcaggggtaggaactctaaaagccatccctgtcaacttacctttcaactctggtaaaaccaaagccacagctttagccgcaccagtggaagaaggaataatattttgagccgcacctctaccaccgcgccagtcttttttacttggtccgtctactgtaggttgagtagcagtcatcgcatgaactgtagtcatcaaaccttcagccaaaccaaagttatcattaataactttagcaattggcgctaaacaatttgtagtacaactagcattggaaacaattaaatcctttgcaggatcataggattgatggtttacacccatcaccattgttttcactttttcaggatcttttgtaggtgcagaaatcacaactttttttgcaccagcttttaagtgattttccgccccagcataatcagtgaaaagtcctgtagattccacaacataatctacacctaatttaccccaaggtaattctgcgggatttctgacagaaacacaggggataaaatgcccatcaattaccatgccatcttccctagcttccaccttaccttttaacttaccgtgtgtggagtcgtactttaaaagataagccaaattatccggtggtactaagtcattaatccccacaaattcaatgttaggattattaatacccgcacggagtaccaaacgaccgatccgcccaaaaccgttaatagcgactttcaacttagccaaaatttaacctcctgtttgtagagatttaaccagagaaaattggccagattaattctactctgacttagctgattcttacagtaaaaaaagtcataaagctgatttatttggtatattttaatgtttggtaattggtaattggtaattggcagaagtgttgaatgttaagaaatctgtgataaaaatagcccaaaatatattaaaatttgagcaagctatatcaaaatattgatttgatcatgattataaattcatttcccaagattgtcaaagac

SEQ ID NO: 51 - DNA, 38506 bp, Sphaerospermopsis sp. LEGE 00249
  LEGE00249_66
gcagcactttcgcgttgttattaggctcgtcgcttatccacctgctactatccgcaggtgcattttcataattattatgccaatcatcttcacaccactcccacacattgccgtgcatatcatataacccaaattcatttgctacttgaaaactgcctacttctgtggtttcttctctataaactccttttactccattaccataagtgtacttaccgttataatttgctaaatccgttgttattgtctggccaaaatgaaagggtgtggttgttcctgcacgacaagcatattcccattccgcttcgctgggcagtctgtagggtcttttggtgtagtttgatagtctagcgcaaaactccaccacatcatgccaagaaaccctttctacagggcgttttgctcctttaaattccgatgggtctggttttagttctttgttgacttgaggtaactgtgctaccgcttgccattgtgcctgggtaatcggatatttacccattgaaaagggcttgatagtgactttgtgttgcggtctttcgctgctatcacttccctcttcattttctggtgaacccatgatcaaagttcccccaggaattagcaccatttctaattcaatgtcgtttcctaagttttctataaaatatcgggcggtttttttatggcgattaataatagttttgggcattgttagaaaattaatagaaaataagtaattatgtcagaatcaggatgtccaggattttaggattaacaggataatttattttaattgacgtaatatatctagtttactatttaatgactgtaattgctctagtttatcaacagcatatttagcaataattaaagcgtctaataaatcgtaaagtccagtaattatcctattacctagcataaatttatgattctgtggtaggcggttaagaataggcacataccacttaattaaatcgtaggttttttgaataattggtaattcgttcatttttgctcaaaagggtaaaaattcaaaaaaattttttaaagctcgcttcgctcgctaagggtagaggaaagaagggtaaagggcaaaagggcaagagtataaagggctacaaattccacgcagcaccacacacaacacgaaaaccgcggctgaagtggtcgaagcccgcaacaagagagctgcgacgcgccgaacggcaaccttcaggattgttgccccaagaaccaccgcgcagcactttcgcgttgttattaggttcgtcgcgtacccacgcgctactatccgcaggtgcattttcataattattatgccaatcatcttcacaccactcccacacattgccgtgcatatcatataaaccaaattcatttgctacttgaaaactgcctacttctgtggtttcttctctataaactccttttactccactaacataagtttccttaccataataatttgccaaatccgttgttattgtctggccaaaatgaaagggtgtgattgttcctgcacgacaagcatattcccattccgcttcgctgggcagtctgtagggtcttttggtgtagtttgatagtctagcacaaaactccaccgcatcatgccaagaaaccctttctacagggcggtttgctcctttaaatctcgatgggtctggttttagttctttgttgacttgaggtaactttgctaccgcttgccattgtgcctgggtaatgggatatttacccattgaaaagggtttgatggtgactttgtgttgcggtctttcgctgctatgacttccctcttcattttctggtgaacccatgatgaaagttcccccaggaatggctaccatttctaattcaatgccgtttcctaagttttctataaactgctgtgcttgtttttggtacttgttaacacttaattctgttttctgtgttagcccaaacaactgtgattttttgattaattcaattttggcaaatgtaaaagtaaaaggttgtagtacatcatctttaatagtaacagtggcacattcaaattcaaaggttttgatttctggaaaatctaactgttgtgctaaacgcgcataatctccccctaaattttgcaatacttccttagtaatctccgcaaagggaagaatttctgctttggtgttttcatcccagtcagagttagcaaataacaaagcttgaaaattcttgatttggatgccagctttctgagctatatattgagaaacagtctcaaatacagcatcaacttctgtctttctaatagaacgaagtaaaacttctctcactccttttacaaattcatatcgccatatttctggttgattttcttcgctcactaactttaattctaacaacccactcataaaaatttccgccaaaataattggcttccttggttggggcaacattttttcctgaattaaatgaattacaggcatacttaccggagcagatgccatataaatcgccaattttctcgctagaggggaagcactatgataaaatgtattaactaatttattaactaataattctgggtcttttgttgtttgtgaactggataatttatctgtaggtattaattctttccagttcggcataaatacaatacccacagtgtccatagtacctgtaccagccatcacttttgcccaatattttaaagattcaggttctaaaatcacaataggtaactttaatgcttgattgggtttttcttctaaccagatagggaaatcatgaacagtcaattgagaattgcgtgaacctggttcaatcgcacttaatgaaacggaaatacccaaatctaaaactgtgcgttcccataattgttcgggtaataattgtagaacagttaccggaacttgtttagaccataattctaataattggtgtatttctccttcccaccataaagaggaaacacagtcactaattaataatattaaccgtctaccattaggttctaataattctttgggactgcgggaacgttgtttttttgtagtttttccctgctggtgaaaaaattgcggtttaccatcatttgcgtttaaattccaagtataaacatttctaaaagctccatgtctttccattaatttgcgaaactcattgatagtttcttcccaaacaaccgtagcgcggttttcttcaacaactatcaccaaatctaaccaacgttctcgcgcaggttttaaaactggtatccaaacatcattttctgctatttgttgaacagtattttcttcatctaaaacaaattttatccgagatggaacttttcgcatcaatggccgcaatgacctaccaatttctaaagcattaggtaaagcagcaaccgcaggagctttaaaaggtactcctgatgatgaaggtgttggtttttcaggggttggtttttcaatagaattagaggatgaattagaatctatatcatcttgagtataagctttagctgtgggtgcttctgttttttcttctgtagaaaaatctgaattttcagattttgtagatgttgaaggttctcttagattaggtagtatattagcggtagtctgagaactctgatttgattgcgtaacttcatcaacagatgcaattgctgatggtaattttatctgatttgctaaccagagagcatcagcaatatcctctgcactcatgtccagttctaactgttctaaaagtcgaatcaatctgttaatcatgagtcctcttagctatctcattagctatctaaatattttaatatttctgcaatcaacttttttttagttgtatctgtgggggattgttcattagtgactaaatagatagcattgagaagttggtctgttgctaattccccatttagacgttttttgagaaattgatcaattaaattatctgcttctttagatagtttatcatctaactgtagatgtgctttaactatccgttctaattcttcttgattaggttcttgaatatccaatctaatacaacgtcttaaaaaaggaggaggaaaatctcgttcaccattactggttaaaatcacaaaaggaaaagatgtacagcgaaccctaccttgtttaatagtagcttttccatctttatctgctgtctgtacttctacctgatctaatttatcagctatgcgtcttagttccggtatttcaaactctccctcttcaaaaatatgcaataaatcattaggtaaatcaatatcacttttatcaatttcatcaattaataaaactctgggtttatcagatggtagtaaagctgttcctagtgaacccaaattaatatatttaccaatgtctgctagattatctttagattttttatcttttacatcttgtaaatgttgtattgcctcatctaataatcctagattcaaatatttaccaagtttatctacattatccttttcttttgcatcttgtaatctgcctatggcatcataattataaagaccatcttttaatgtggtgcgtgtggtaattggccaatgtaacacttctcctaatcctaattcataagcgacagcataggctaaagaagttttacctgttcctggtttacctgttactaataaaggtcgtcgtaaatataaagccgcattgactaattctacctcttctggacgggcttgaaatgtctcagcgcgtctttttttggggtcactttcactattattaaaatctcgccaacttggtggtgctggaagtttagaaccctcctttatccacttttcattaacttcattattgcctttaaatatttgccagtcgttagtcatagttattacctaattgttgataatgattgggttagattcaggtgttaaaatataaggattttcacaaatgagaataatatcatttcctaatagatgattatcactattattaattcgtgattctaagcggtttattctcacattttctagtaattcataaatacagcagtttagatcatgattttctctattttgataatctgttaaagaaattttatctctatgacatatagctaaaggaattacattactctgtaatgaaccaaaaattttagaaattttatcagtatcatttttgatatggtcatcaaatatatttaaaataataccaattgcttgatttacaaaagcagaaaaactgttagcatcatattcatgtatttttggaaaattattacagtttatattctgtaatttctcccatttgtcaatccactgttgttttttgactctcagatattgtttgtctaatcgttctacatctcgaacaattactctgtacttctcaccaataggacttgtttcaccaaaatcatttatttcccattgttcaacaggataagtaagatattctttaggtagaaaaaatactatatttatatgtttttctagagaaacatttattttttcggtcaagagagaatttaaaattttggggatatcctgaattttaaaactttgatcatgagaatcacaaatatcaattgtatgatagtatgagctatctattatataattttgaatattaggaataacccaaccactaattttaaatcttggattttttgatcttgattttgtttgtaatggttctattttaattaatatatatgattctggtataatatttgggtttggctcatccgtactatgtgcagatgttgaatcaaaattttctatatcagattttaattcttctatttgctgatcagtatccttcatttctttctcaaggatgtctatttgtcgctgcaagttatttttatcttgagcatttcccgttgcattaagttgttcacaaagtgcttcataatccttttttagctctttgtatctcttttctaattgctcaagtttaatatcatcaggttttgccatattacaaaaaatctccataccataatttattatcaaaattgtttaattatttgattagatgggtagggatttatcattgctaaacccctataaatagatgagaatttgtcataggaaattatttactttcctttttgattgcttgtctcaccacttctatatctaactccaatatacgagcaatttgttctacagttaacccctcacgtaacagtttaggaatcgtttctaacttcacctcttccttgatctcttccctaacttcttccttaacttcttgataaaatcgagtttgttgccattctgttaatccaaacattgcttctaactcctgacggctataggatgaaaatttgtaaatcgttttcattttatcattttaaaatggtgatcacccgatcatttttaactgttcaacgacatcattcatatccttttcaatcctgtttaattgtcgctgcaagttattacgactttcggcattttctgtataattcaattggttataaacggcttcataatcaccttctaaaattactaatcttttgttcaattccctagctttaatttcttggactcgactcaaagagggagaagaatttattgatggttgctgaatagattgatttaaaaaactccaagcttcaactaacacagttgtagaaatcataaatgctgcttttacaccttcccgctttttctctgcggccacagccattcccacaactccctgtaatgtttcatcccaaataggagaaccactaaaaccaggttcaacttgataaccaggaactttaattgcctccatttgtacacaaccagtaccttgaacatcccgcaattcaccactagcccaaacaccagtatcatgtccttggggaaagccaaaaatgcggaatttatgctgccaatagtctgatgtagtgacaagttttacaggacttacgcccattggtaaagtttcctctatctgtaacccagcaatatcttccttactttgtcccgggttcacaggttgccaaaatacaaccttagcttttaatttttgtccaggtgcaatcaggggaaaatcaagttctataatgccatctggtgattcttgtatgttagtgataatactcaaagcggctgtcaccacatgagcgcaggtaagcaaatggtactgactcaccaaaaaaccagcaccgataactttaccgtttttattataaatgcgagcgatcgcacttttaaaggttacaaaataatttgctgttgacatggaagctgtaaatcttagtctttactccacttaacagttacttcaaaggtaacttccccacctacggaagttaatatagcgccagcatcagcactgagtttgacaccaaacttcacttccatttctttcggacctaaatctttaaatttattattcagactagccaccacaggcttaatattatctatcgcttccgaaaatgttttttgtgcctttgcaatttcttttccagaaggtagtgccactttctcaatagcagtagatgtatcttctgattcttcaacttctactaaaaaagctgttccatcttctaaagcaaactcaactaattgtttttctgccatattacatatatatgttactattcagactatgcaacgtcaaatatacaacattgccaacatatttgtacagcagaaaatagcactaaagacagttgtcttatggctaaaggcagacttaccccaaaattaccccaaatttatcccaaacaacaaaggacgagcattaaacccgtccctatacttattgataaaacctgtaaatagcttggttttggctgttttctctcaaaggcgacacccagattcgaactgggggataaaggttttgcagacctctgccttaccacttggctatgtcgccgcactcacaattacttatattatcacctttattcccaaattgcatcccctggggaaaaatttttttggtgattggtgattggtgattggtgattgggttattaacttcccctacctcccctatttcctattcccttttaacttcttaactgtcacctgtcacctgtcacctgtcacctgtcacctgtcacctgtcacctactcaggataacttcacctcatcagcaaagttaccccagcggacaaagtgaaatggacctgcgacagaaccccaaagatgctcatcggtgtctggatctcgtcctttgtcccaactgatgaacttatctccatcaatttcaaatttactatccaagtaagttctttgtcctttgcggacgacgatacaacctttacctggttcaacgtgacctctaaaacaattcccagtccactctacaatcatgttacaaccggagagtttttccaggcgatcgccacttaactgatacaaccttcctaaatcacgggatgcaccgaaaaagtctttttcttcttttaccgtgtagttttcaatcaggattttctcaccctctgtcactaacttcaatacccgcaaccgataagggtcattgagcatataatcataagcctgttctacaaaaaaactcacccccgataacaacccataagggagaggacgcatacagacacgaatatgggcgtaaaaagccggattttcaaacacttgagcttgattactaaaatcagcggccatccaacgggctaaggtaagaatatcagtggaatgagtcatagtaatttaaaatcccattaaccaaagcgtcctgcaacataatcacgggtacgctcatctaatggattacgaaagatttgacttgtatcaccaaattctaccatttgcccgatcctactttcatcggtgctaaagaaagcagtaaaatcagaaacgcgggttgcttgctgcatattatgagtcacaatcactattgttaactcagatcgcaagctatgaatcaattcttcaactttcaatgtagcaataggatctaaggctgaacaaggttcatccattaataaaacttttggtttcactgctaaagcacgcgcaatacataaacgttgttgctgtccaccagaaagacctaatgcagatgtgttaagtttatctttcacttcatcccaaagtgctgcacctttgagcgccgattccactatttgatctaatttaaatttgggacatttaccagcaattctcacaccataagcaacattttcataaatactcatgggaaaaggatttggcttttgaaataccatgccaatttctcgccgcaaacgattaatattaatgcgggggtcatagatattttgttcataaaattctatgcttccttcaactttgactttaccttctaattcactaatccggtttaaggttttaatgaaggtagattttccgcaaccactaggaccaatgagtgcagtaacttggttcttataaatatctaatgatatgccttcgatagctttgtaattaccataataaaaacttaggtttttaattttgatggctggaattaggttactcatgattattttagtgataaaaaacggtgaaaagtattggtgaaacaattaataattacttgaatctgcttttactacttaataaacgagagatgagactaaagaacaaaactaaactcaataaaatgatagaagttgtccaaactaatttgttaatttctgggtcaggattattgtaaagattgaaaattaatacaggtaaagaagcagtcggactcattaaactatcggaccagttttgactaaataaagctgtgaaaagtaatggtgctgtttcacctgatgcacgggcgatcgctaatgcaatacctgtagtaattccgggaattgctgatttgacaacaaccctaaatgtagtttgaaatcttgttcctcctaatgcagcagaagctaaacgttgttgagtgggaattagttttaatgcttcctctgttgttaaggcaattattggtaacataatcacagataaagcaaaaccaccagcaaaggcgctaaattttttagtaattaaaacaacgactccataggcaaacattcctacaacaattgaaggtacacctgtgaggatagaagttagaaaccgcacaaaattagtaattttattagttttaccaaattctgctaaaaatatgccggtcattatccctatgggaatgcttaataatgccccaaaactaaccataataatagtaccaataatggcattagcaaaaccattttcaatcagtggaaggtaaaacatttctgattttaacccagaaattccccttgatataatttcccacaaaattgatgctagtggaaacaatgccaacaaactcaatatgaatgataaaccattcatggcatagctaaacaaacgcctctgagttggtagcgggctgagtaattctttaggtaaagattcaatattttctggatttatatagctactcatgggattttggattttgaattttagatttgggattttttgagatgtttctgaatttatgagcaatctgtttgtctatatttgaaagctgaaagctgactaagaatttttcttgcgtacccattgcactaatagcacagcaccgatattaactgctaaggttaaaacaaacaaaatcaaacctaaataactcaatgaaccaatatgtaaaccaggttcagcttcggcaaattcattagctagaacagcgggaattgtataagctggatcaagtaaagatagactaatttgagccgagttaccaattaccattgttactgccattgtttcaccaagtgcgcggcctaaagctaacattgctgcacttaccattcctgaaaaacctgctggtaataacacccgaaaaatggtttcccaacgagtgctacctaacgccatagatgcactgcgtaattctttaggaacaaccatcaaaacatcacgagaaatagcggccattgtcggtaaaatcataatcgagagaataattcccgccgttaacatattattacctgtgggatattcagtattgaaaaaggggataactttaaaagttttacctaaccattgttcaaagggttcgataatgggaataaatacaaaaattccccataaaccgataattacactgggaattgcagcaattaattctactacaaaagcaataatatttctgactactaatggtaaaaagtcttcactcgttactagggcgactgatatacctataggcacagtcaataaaatagcgatcgcactacttaccaaagtaccataaatataaggtaatgccccaaaaacttgattacctgtatcccaatcttgactccagataaaccctaaaccaaattgaaaaaccgctggtttagcttcttggaaaattacccaagtcatgacaaataaaattgctacagtaatggcagcaaatagataaactagaaatgtaaatccttgatcaaatctaaaatttaatccaccagtaacagttaagttgatattttcatcatttacttttaagtatgatgattgattgtgatcattattttcaaaagaattgttcataattaatcaaaacaattaaagtgaaatatttagttatccaaagttcaatagtgaattgagaaaggattcagaatcaatgagagttttccatttatgattattctgactcctgactcctgtacgggcgaagcattcgggcgataaattttcaattttttcacaggctattttccgaatgcttcgccccttgcctagttttgattatttaacggtagtatttactgtttgtaaaacacgattgacgacatcattaggaattctggtgtaattcatgtcatcattaaattgttgaccatctttgagtacccagttaatccattttttaatcgcatctgctttagctggagtgggataatttctataaatcatcatccaagttaaacccacaataggataaccctgattaggatcacctacaaatacacgatagttagctggaaaagttacacctgataaagctgcatttgcagttgctaaagaaggtgcaacaaattctccttttttattttgtatttctgctgatcttaatttgtttttagtagcgtagtcatattcaacataaccaatagctccgggagtacgagcaactaaagcagctacaccgggattacctttacctttgaggacattttttaaattccagttaggagcagtattagcaccaattctacctttaaagtagggattaatagaactcaagtgattggtaaaaatgaaagttgtaccgctaccatcagcacgaactacaaatttaatcggttgatttggtaaatttacccctgggttatcagctttaatttgtggatcattccagttagtaatttgtccagaaaaaattgctggtagggttttacgagacaatctaagtttgtttacccctggtaaattgtaaactacagaaactgcaccaccagcagtaggtactaaaattacaccatttttaactttagccatttcatcatctttcatagctgcatcactagcaccaaaatctacagtaccagcaatagtttgacgaataccaccaccactaccaattgcttggtaattaatttttaattcaggatgtttctttcttacttcccgtgcataacgttcatagagaggtgcgggaaaagttgctcctgcaccgttcaaagtttgagcttgagcaactgctgtgaaaataggactaaatgctacggccgctgttactacagaagtagtgaatgcacggctaaaaatggtggttgaaatgttcataatgcctcattttgaaggatgttttacctgatggaattacagccttatataaagtttatacttgctgattaactagaaattaataaccgtcaaagaatagattaaactatgtttaaatttctttctaaaggactagtgatagtaattttgttcaccaagttgtgtaaagccgaatcataatttttatgattttatgcaattaaatgtatattcacggttgtaaaagttgcgtgtttcaccataaataaacccagcagggtcattatcagaacccctgctaggaaattagttgatatttgtgccatgtttgcgcggatcagcgtttatttgtcctaaataatgcctacccctacttaaaataactatatatagtatgtaaataggttaagaacaatcatataataggttaaaatgctgttaaacttatttttcctcaattcgtaaaattgcagagttaaattactgagtggaaaatccaaatcgctgatattttagtaatctaaattaatggtaaattttcaaagcttcccgacggaggcattgatcacagcacaatttgaatattcaaacatctacagttatggcgctcatagttcaaaaatacggtggtacatctgttggttcggtggaacgtatccaagcggttgcacaacgggtttataaaactgtacaagcaggaaattccgttgtcgtcgtcgtttccgcaatgggtaaaaccactgatggattagttaaactagctaatgaaatctctcaaagtcctaaccgtcgggaaatggatatgctgctttccacaggggagcaagtcactattgctttactaagtatggctttgcaggaaattggacaacctgctatttctatgactggcgctcaggtaggtattgttactgaagctgaacatactcgcgctcgcattttgcatattgaaacagagcggttgatggggcagattaatttaggtaaagtcgttgttgtagctggtttccaaggaatttctaacactacagcaatggaaattaccaccttggggcgtggtggttctgatacttccgcagtagctttggcggcggctttgggagcaaatttttgtgaaatttatactgatgttccagggattttaactacagatccgcgccttgtaccggaagcgcagttaatgacagaaatcacctgtgatgaaatgctggaattagctagtttgggtgcaaaggtattacatccccgtgcggtggaaattgccaaaaattatggtgttcctttggtggtaaggtctagttggacggatcagcctggtacatgggtaacatcgccaaaagtgcaagaacgggcgttagtcaatttagaattagctcgtcctgtggatggggtagagtttgatataaatcaggctaaggtgtctttattgcgtgtacctgataaaccaggggtagcagcaaggttatttaatgaaatttcccgtcaacaagtagatgtagatttaattattcaatcaattcatgaaggtaatagtaacgatattgcttttaccgtaaatacacctattttgaaacgagcggaagctgtggctgcggctattgcaccagctttgagaaatcaacccaattcagatgaagcagaagttttagtagaaaataatactgcaaaggtgagtatttctggggcgggaatgattggccgtcctggtgtagctgctaaaatgtttgtaaccttggcggaagcgggtgtaaatattcaaatgatttctaccagtgaagttaaggtgagttgtttggtagatgcgggagattgcgatcgcgctattgctgcactttgcaacgcttttgaaattactgcttctcctgctgttctatcttccccaactcccgaatctcccgcagtgcgtggtgtcgctttagacatgaatcaagcgcggttagctattcgtcaagttcccgatcaaccaggaatggcggcgaaattgtttggtttattggcagaatataatattagcgtggatatgattattcaatcacaacgctgtcgggtgattgatggggttgcgcgtcgggatattgcttttaccgttgcgcggatggatgcagaaaacgcccaaaagaaattaacccaagttgcagatcagttaggatggggtgaggtagttttggataatgcgatcgctaaagtgagtattgttggttcgggaatggttggacaaccaggtattgccgggaaaatgtttacagctttagcagaaaataaaatcaatatccaaatgattgccacttcagaaattaaaattagttgtgttgtaggacaagatgagggtgtgaaggctttgcaagttattcatacagcgtttgggttagctggaagtgaaaaatttgtagtacccgcgtgaaaataatactcagatcctcgacttctcaaagaagtcggcgatctattattaggaattaccattcaagtctttaggccacagtaagggcgaagcattcggacaattaattattaataattagctaattctttgatcgcttcttctttgagtcgttgacgaatagacaaaggtgctattacttctccatttggccgccagtctcgtaaccgcatcaaaacattaatatccccagtacgtatccaagcttgataataaatatcttgtttatttctgtgtttgataatatctaatatttgctgctgctgggtttcaggaatgtctgctgtaattaaatttgctaatttttcataggcaatacgctggaaagaatgatggcgaaaggtgttatctacataccattgggcaaatgctgggggaaaacgaatgatcaataattcccgttgtaggtaaaagttgaaaccccaagctttttctaattctgtctctacatattctggggtgggtaagttgccactgtgccacatttcttttaattctttgggtatacccggatctccccagggaagaatttgcaatttttctgaggcgatgcggtccagtcggtagttgtgccatgttatatttccttggggatctataccataggcgctgagatatttggcacgtcggaggtaatgcaaacacactggataaacggttatttgtactttgcttgctgtagctgcgatccaatattcaaactgcactactccagcggctggtatacgccacagttgttctagctgttcttgatagttgtctacttgatcctgcatttctggggagagtatatagtctaaatgcagaaatatccgttgttgtggttcttggatggtgggggatgtatgggtatgatctactatttgttcccacaagttttgaatgatgatatctaggtttggctgcacaaaggatatggactctaagacgtgcagtagttcccaggtttggggtagggacagttgggtaaaggttgcttgtgctgttgcagaaattgttggtgctggtagttcggttttagagagagtttgatattctcctttgactactgtttgcagccatcctaaacgagttagctgtttgagatcatctctgagggaacgatgaactgtggcaaaggggggttgttgtagttgttggtgcagttgttgggaactgatgccggtgagttgttgtatttcttgttgccattgggtttggcaaatgtggctattggcagtttgaataatttgccatccgctttgatgacagatgcaggtggggtcctgacatttggtggttatttgttcggcgttgagtttttcgcttttggggtgatagtaggaaaataggcgatcgcgtaattgtgcgtaggtaaatttttttgctaggtccgttgtccagttttcttccccatacagtttatttaatattacccatagtctaattgaacgctgcaaacggttggctagttgtcctgctgctaaccaatgtaatatttgtggtgtgggtggataggggaagctgttcaatttgataattgataattgataattgacaattgtttaagagggtgtttaaaatctcttttttccaggagacaaaaaaaccaattgcagtaagtataattttcaattgtacattgtttattagacatctccacaatagaatgtattaatttgtcataagttgtaggggcgaagtaggggcgaagcattcgagcgattaatgatcggtattcaccaaaggatattttccgaatgcttcgcccttacagggcgataatttatcgaaaaaatcagacatctagatatcccaaatgcttcgccttgcccccataaataagttccagaatttcttttctggagatgtctattgtttattgtctattttggcaagttcaattttttgtattggcactgcaaaagctgattaaattacacaggacttacgcaacagggaacgaaagtaggggtaattcatgaattacccctacgcaagaataaggttttcagtcacatcttgcgtaagtcctaatttattacaaccaagcgatcgcattttttagtaattctatctttttttctccccaagttttgtttccatccccttgcggggaattggttatgaaaaacaagaaattaatgaaaatgtttctagtgtactaggagattgtttccatccccttgcggggaattggttatgaaaaacttctgatgtgacgctgacctgacccccgcccccggttgtttccatccccttgcggggaattggttatgaaaaaccctacactcatggagaccttgttacaaatagctttcaaggggcgtttgcgccaagctacggaaacaaaaatgtaacaagcgaagtcagtatttaatttttaaggtacagattgctgtttccagccaataaatacagaataaaacaaaaacttccagatgtcaacccaaaaaaccaacattttttgaaaattaccaaagattactaaatgtaaatctttatcaattgataattgacaattgataattgacaattgtttcattcaaggtttaaaacctcctctttcaaggggaaaaaaatcaaaaaatgaggtaataactaaattttattttgcttgatttcatcctcaataatttgaggtaatgctgacttaaattaaatcttacccaaggataacttaatttgcatttcccaaatactgacaacgcttaaaaatacctgagtattgggatcacaaagaagttgataaacagcaggtgaaattcttggaaaatcacttgtccaccaaataaatacatttttcaggtaaataaaccacattttgatttaggtttcgcgtcaacaatgtaggggcgaagcattcggacaattaattatcggtttttacctaagactatgatccgaatgcttcgccctgactgtggtcttaggttttacctaagactatgatccgaatgcttcgccctgactgtggtcttaggttttacctaagactatgatccgaatgcttcgccctgactgtggtcttaggttttacctaagactatcatccgaatgcttcgcccttactgtggtcttaggttttacctaagactatgatccgaatgcttcgccctgactgtggtcttaggttttacctaagactatgatccgaatgcttcgcccttactgtggtcttaggttttacctaagactatgatccgaatgcttcgcccttactgtggtcttaggttttacctaagactatgatccgaatgcttcgcccttactgtggtcttcggttttacctaagactatgatccgaatgcttcgcccttactgtggtcttcggtttttacctaagactatgatccgaatgcttcgcccttactgtggtcttaggttttacctaagactatcatccgaatgcttcgcctgtggtctaaagacatagcgcagggttgttcctggttcggttaaatagagtgtagtcataggaaacaggaaattaagaaagtaggggtttagcagtgctaaacccttacaacactttggaggtataaacgaagtattaatgtttcctcctgtatcagtaatcattttgccttgaggttagaagaccccttttctatcggggtgaaataatacacctattgaattgacaattgataattgacaattgataatttatgaaagagacaattgataattgacaagttatgaaagaaaacattattaaggagaaaagctttgattttgcagtccgtgttgtcaacttatatcaatatttaaataacgaaaaaaaagaatttgttttatcaaatcaattactgctttctggtactgcaattggagcattagtcagagaagtagaacaggcagaaagtaaagcagatttcattcataaattagcaattgcccttaaagaagcaaatgaatcagattattggatagaactaatgtataaaacagattacctcacagaaaaacaatacaaaagcatcaaaaatgatatcacggagttaatcaaacttttaacttcaatcataaaaaccagcaagaaaattgttaattgttaattttccattgtcaattgtcaattgtcaattgttcatatttacaaatacaggaacggagaaaagctgatgactgaacctgctttacgcttgctattaagtgaaaccctgatggtagaggctttacattatcaggttttattgattgaattaactaggagcgatcgcattatcgaaccccaagacttaacaggtttagaacttccagcaggaattgatacaaccggtggtgtggtaatttcgggacgcgcacccatttggttatatgcttatctgatccatgaattacatcctaccgcttgggttgcttgttatgatccccgcatcggtgcgatagtcgtagctactcacactcgtttagtacaaattggacaagtgttcaaaatcattccccccaacggaagaacccaggaaggagatactacaccagaacaacaatggtctaattattttcgtcaactgggagaattgagagcaaataatagcgcaaattctcccttgacaaaaccagaaaaattgtgtacagcgttgatggtagttggtccccccgacagtggtaaaagtgtattttcccatgggttatttcaagctttgctcaaagaaaatcctgatatttatttacaacgcgcacattgggacggtgaaggaaattatgtgttagaaatgggtgcagaagctaccgatgaagaaatcgaagcctttaaagcacgtaatcgcggatctttaacagaaagattttttccctaccaagcgcaagctattcttcagttacgcagacaaaaatctttagtaatagtagatgtgggtgggatggtgcaaccagaaaaattaccactgttggaagtttgtacacattatttaataattagttctcgactagaagcggtggaaggatggcataatttttgtggtatttgtgctaatttaataccagttggtgtcattttcagcactctcacagaaacggagatagttcatcaattagaaccttatgtagaaatgacttgtggtgcttgggttagaggtaaagcgcgtcccattcctgatattttactggaacgggtacaagatatgatcaattgataattgataattgataattgataattgataatggtttcattcaaggcttccgccgtgagcgtcagccgaacggtttgaatcttttgctttctaggagaaaaaaagaaaaaatttcctatttccccatcctctcacgaatgagagacaggtaattgtcaattaccattagacatctccaaaatagaatgtattaatttgtcataagttgtaggggcgaagcattcgagcgattaatgatcggtattcaccaaaggatattttccgaatgcttcgcccttacagggcgataatttaacggaaaaatcagacatctagatatcccataagcttcgacctgtctccataaataagttccataatttcttttctggagatgtctattgttgaagaagtgccaagaaggaataaaatagtagtcaagcaagggaaaaaatggtgatgaaaggtaaaagttcggtaacaataggaattagttggtgtttagcttggggtaatggaagaaaaccgcaatttgatatttctattttgcgggaaatgtgcgaagctttgagaactgggggagaagttccagtagaggtaagaactattgttcaacaagtggaagatttgcaaaaaattaaggaagattattttcctgagactttggaacagctaaaaaatgattattctgatttatggaatcaaacaactaatatcggtttagtttatgggggtgtgactaaggttaagcagtatgtatttgaatcagctaaaattcaagaagtgcgtggtgcttcagctttgttagatagaatcaatttaattgatttacctgcttttttcaatgttaaaaatcttcctcaaatttataacgctcaatgtagcgatgtgagagcatggttaaatgataattttcatcaagattataatttatcagaagttctcattcccgaattaatcatctattctacagggggaaatattctggctttttgtcctgctgcttatgtaaatgacttagcagatgctattgaaaaacgctatacccatgaaacattaacagctaattcctgtgcagttggtgagacatttagaccattagaaattagatttggtttactcaaagaaaaaatcgaagatacaccttggttagattggtataatcagaattatcaaaaacagatagttcaagcttattttgggtttcctaaagatgaaaaagaacggttagaagcattcagaaaccgcaaaagttttaacgaaattaccaccaaattagcgattttatttaatcaaagacgtagcggtaatgatattactggacggaatacaaatcgtcgttatccagtaatgtttgaaacccatccttatttaatgagagatgggagtgatagacgttctgctatcatgagagtagatgaaggtttagcaagagaaaccaacttttctgaagcatcagtcagaaaatatttagttggtgatagagcaaaagacggagacacaaaagaaccagaatggtatttagaaacaaacccaaaatggcacagaggaatatttgaaagttgggtaaaaagattcgatagatttttagacaaacatccccatttaaaaactaaatattatggcaatatcccacctcaaaatgtagaaattcccaaaacactaactcatgtatccaatgctagtaaaggttttattgcttatatttatgcagatggtaataacatgggtggatatatccaaaaaattcgcacccctggaaaatacaagaaatttagtttagatgtcagcgaagctacagaagaagctgtattttacgcactagcagaaaacttacatcctcatgaactcagaaatttaaatgatgaagattcacaactaaaaaatggtcaacttgttcatccttttgaaatcattaccataggtggtgatgacgtttttaccattgttcctgctaacaaagcattagaaatttcgcaaataataggagaaaaatttgaagaactaatgattaacaaaacagttgacaaatcagatgaaatagcagattatagaattgaacaaactaaaccagtagacaagaaaaaaatccatcgttatcaaccacaaacagcaaaaccttcagagtgcaaacttagcacatccataggcgttttaattaccgctgatgatacaccaatttactacgcccaagacttagtaacacaattactgaaatcagccaaagaaaaagccaagaaattaaaaaaagtagaatatcatggaggaacaatagattttatcaccttaaaatctgtcaccatgattgcatctaatattaaagattttcgccaagaagcattaactaaagaaagtccgcagaaattaaaactctatggaggaccttacacattacatgaaatagggggattaattcaatcaatagcagcattgaaaaaaaccaaattccccaaatcacaactttatcaaattcgtagtttattagaacggggtaaacatacagcgattctcaactatcgctattttagagtcagactgaaacagggaaaaacagaattacaacaacattttgaagatgcttggtgtttaccaaaggatgataaaaatggtggtaacttagcaccttggatgtatgatacagaagacaaagtttatgaaacaatttggcgcgatatggttgatatttatggatttgtagaagaaccaaaaaccgaagaatcagagaacttagaaaatttaattgcgggggttgagtcatgattaaattagaaacaattaataattcaatccacacaaaaaccatcaccgctatcattgacacagcattatgtataggtgctggaggttcatctggttcacttgcagataaaccaatagttcgcaacgcagaaggaaatttactcatacccgcttcccaattaaagggaagattgcgccatgaatgtgagaaaatagttagaggtttaaaatgggatgtttgctattctcccaacccgcaaaccatgtgtccccaaagagcgggtttagtgggaaattttaccagagaagagtatataataccaaaagataaaaaaacagaagataacaaaaattatcattgtttaatttgtcaaatttttggaaatccggttttaccttctcggataatatttgatgatttaatttgtgaagaagaaccagaaaacttaccagaaattattcgtcctggtgtaactattaaccgtcgtcgtcgcactgctgaagaaagtaaactttactttttagaaacctcacccccaaatacaaaactgagatttacaggaaatattcacctattaaatgatgcacctagctatacaaaaccattaatattagcaggattgaaacatattaacgctttaggtggaagtaaatcagccggtttaggttggttacattgggaattaccagatttaacaatagaaaaagaagcatgggaatttttcgctaaaggaagtgagaaagaatgaaaaaaatcgaattagaaatcaaagctttatcacctttagcaattggacaaaagaaaccaggaggtaatattagtgaagtggaaacatttattcctggttcagtcattcgtggtgcagttgctaatcaaatattgaaacaatcaaatcaagaaattacagatggtgatgattttcatcaattatttttgagtgaaaatcccgcgatttttcaaaatgcgtatccaggacatggtaaaattaaatcagaagttagagtcatacctgcaactgctttaagttctaaaatcaaaccagggtttaaaatatcaaaaggggatggtgtttttgacaccttaatagaccgtttttgtgcagaaaattatggtcaagtatatgattttaatagtcctgtacaaccccagaacaatgaattagagggagatagagtagataattttacaggattttatagtcaaaatatcagtaactatgagaaaaaagcagccaattctcgattattaaccagagttgggataaatagaagacgtgcaacttctgaagaaagtgtactttacagtattcaagttttgaatgaatcaaaacaacatcaaaaagaagctgtaatatataaaagtgcaattttagtacctgatgatttagcagcatctttgcagacattcattgataatcatcaagataattttcgcttaggaggtgcaagttcacggggtttagggaaagtaaaaataaccgctaaaaaaccaagtgatatcaaaacaaatttgggcgatcgcctgaatcaatttaatgtaaaattacgtaaacgatggcatgaatggagtgatatatttggtataatatcagaaataccaaacaagagaatttatttcacaattgatttacaagcagatgcgattttaacagaaaattggcaatacacaaccgtaatttctgaagcaatgctcaaagaatttacaggattggaagattcatctttaaaactacatacagtttatagtagttatgattatcgttcaggttggaatgctgcttggggtttaatgaaagatattgaattagtaacaaatagagggggtgtgtatttatttagtgtagataaagaaaaggaaaaaatatggattgaaaaattgcaagaattagaaataaaaggagttggagaaagaacttctgaaggttttggacaagtgcaaatttgcaatgattttcataatgtattaagagaggaagcagtatgagtgaattatcaaaccaacagcaattaaaaattcaaaaaggtatacttcaatctgaagatgatctagtaatctggattaaaaacgccttagataaaacaagctatggagacttagaagaatcacaatttcgtaacttactccgtgttgctgacactacagatagcgcagaagtaattaagaactttatctgttatcaagttggaagagacaagaaatggggaagaggtaaaggttctttagccgagaaaatcattgaagatattgataataatatcaaaaaagctgctcaaataattggtgaatgttgcgacgctgattttaaacctatttggttagaactaattcggcgttatttgggatatggcgcacgtcatttaaagtttaaacgtgatggaaatgcagcttaattagttttcaaatactcactttaataaaggataaactagattcaataagaggaattaagatatgtcagaaaaagttatgctagtgttaattggtggacgtagtgctgttccaccagttgcaggagttcttcagtttcttgatgatattgataaaatcaagtttttaatttgccagggagaacaatttttacagtatcaaaaaaacgtagaaaatcttattaaacaaaaacgtccaaatttattgtttaataaagaaactgatcttatcagtgtcgatcctagtaaattcgatgatgtttatatagctgttgaaaagctttgtcaggatgtagatactttaaagtatgtcaatttaacatctgctcctcaaactatggctatttcagtctatagttatgttcaggaaaagtataaagatgtattaatttttagtattaatactaaccaatcacaaattattccattagtttttggtaaacagccagtagcatttaatcagcgattaacggtaaaagactatgtgacaatgtatggttttaatatttttcaaaagaatgatcaatatgaaagttctagttatttagaagagctagtaaaatacattgtagataatattgaatcgtcaatagcaatcctttctttaattcgcagtattgcaggtgaggatattaaacctccgaagggattgaaaatatctgaaaaagaactatcaaagttagatatatcgtctgaaatactagaatcatttttgaggaagctagaaaaattttcaatcatcaagaatctcgaaatatcaattacaggtattaaatttaaacttgaaacaaaggaggagtatgcttttttaaaaggtgattggttagaaatatttacatattattcagctaaaaaatgcaactttgattctgttgaaatgggagtacacattaataattataggggagaaatagatgtattttgtttaaacaatactaatgctctgatttgtgaatgtaaaactggtaaaaagctagattctgacgatttatctattcttaattcaaaagctgaaaaactaggaggaaattattgtgtaaaactttttattacaagtgagtgtgaagtagatgaaaaatttataaatcaggcaaaaaataataaagtagttgttatatcaggaaaggaactaaaaaatctaactgatattttaatacaacaaatgcaaaatccaacatataaaagactttaaatacaggagacaatttaatcatgccaaaaattcttttcattacagtcggtggttctcatcaacctatcatcaccgctattcgtgaattgcaaccagatagagtggtttttctttgttctgatggacctaaaggtagtaaatcgcaagtaataggaagcggaacaccttgtgaagtaagacgcggaacagaagtaattgaaaagttgcccaatattcctacacaaataggactaggtgataaatttcaaccagatagagatgtaatcttgattgaagaaccagatgatttatcagaatgctatctgaaagcatcattatgtattcagaagattcaggaaactgttgcagatgctcaaatgatggctgattatacaggtggtactaaatccatgtctgtaggtttagcaatggcatctgtggattatcaacttacattatatgtaactacagccgtccgcacaaatattattaaagttgaacgaggagaattaacaggacaagcaacagtagcacctgtagttgtacaacggactctagaacaatttttacctattttcctacaacagtacaactatccagcagcgatcgcacaactaaaacgtcttttatcatcaatggcattaccatctgatattaaacgacaaatccaaactttatatgcttgttgttcaggtttagatgcttgggatagatttgaacatagagatgctttagagttattagaacctcagatgaaaaatccagttattaggaatctagttctatttctcaaacgagtaattaatagtagaggacaaatagatgaaaaatttgattctagtaatggtacagaaggaaatggttatgaaatagttcaagatttaatattaaatgcagaaagacgcgctgaacaacaacgttatgatgatgcagtaggaagactttatagagctttggaattattagctcaaattcggttgttgaaaacctatggtatgaaaacaggtgatattgatactgcgaaattaccagaaaatttacgggataaatatgagaaaaaactttctaatgtcaagggaaaaatccaaatagctttaagaagtagctatgatcttttaagtgaacttcctgatgatcctataggtaaaatatacctagaaaatgctaataaaatcatcaatgctttagaagttagaaataactcattatttgctcatggatttaagccaattactagcactgactatgaaaatgtcagcgaagtatttgttaacttcattaaatctgccatcagttctgtagtcagcaataaaccacaaatacaacctcctcaatttccaactgacctagaaatttaatcccttgattaagtctataatgtccacagaataaatttatttagtcctactgtatagtttctaaaactatgatctctactcccgtctccaactcaatctccttaacagacttcctcaaactaccagaaacaaaaccagcgagtgaatatattgatggtaacatctaccaaaaaccaatgcctaaaggtaaacacagcgccatacaaacatttttagcacctgctattaatcaaattagcatacctaaaaaaatagctcgtgcatttacagaactgcgttgcacctttgcagatcgttctcttgttccagatatcagtatttttaagtgggaattaattccccttgataataatggagaaattcaaaatgaatttacaattcctcctaattggacaattgaaattttatcaccagaacaaagttcaacccgtgtaattaacaatattttattttgcttaaaacatggtactgaattaggttggcttattgaccctcaagaaggcttaatcatgacttttttaccccatcaactaccagaagttaagcaaaatcaagactttttacctgttttaaattctttaacagcatgggaaatatctgttgaggatatatttagttgtctccgtctcaattaattaactataagtggtataattattatgttcgacacattcaaaaaccgcctagaaatcaccggaaaactcacaacaatcaccgcattacgcataagtgcgggacgttccaccgaacccatcggcacagatttacccgtcatcaaagacgcactaggacaaccattaatacctggttctagctttaaaggtgctttaagatcccgtcttgaaagtttcctcagaggaattgatgataaatttgcagctaatcctacaattgaagcagaatcatctattccatctaaaacaataaaagacaaaaatggaaacattattaagaaaggtttggatactatcaaagaagaaattgaaaatgaactgaaagatgatgaacaaaaaaatcttaattctgatcagcgacttacagaagaaattatcaatgcaacagatttaatctctcgcctctttggttcaccttggatagcaagtaaatttcaaatcagagatttaaacgtagtacctaacacctggtttggacaatatcaagaaagagacggagtagcaattgatagagacacagaaaccgccgcagatggtaaactctacgattttcaagtagtaccagcaagtacagaatttcaatttcatgccatagttgaaaatgcagaaccttgggaattaggattattaatgattgggttacaccaatttgaaaccgaacaaattccccttggtggtggacgttctcgcggtttaggagttgttaaactaaatatagaaaaaatgcgctgggttgatgttgaagacgatgcgaaatttatgttgcaatatcttcaaaaattagttatgggagatgaaaccgcttatgaagatgcagcagattatagagatgaatgggtacatcaattaattgatcatttaaacaaacaaatatctcaaaaagatgcaacccaaacaacagcttaaatcttccgtagattgcgttacagataaaagcaccaaaattaatcttgcaaacttccccatctcacccaaatggagttaacataaaaataaacatcatcattattaatcaaaatggcacaactaacaatacaagtaccagatgaattagctaaccgattacaaccaatattacatcgtcttccagaactactttcacaactgatagaatcccatacaccagaaccattaaccttagccaattccagtgatctaccaacaacttatactgaggtcttagactttttaattcaacaaccaaccccagaacaaatagccaaatttaaagtttcaaatcaagcacaaaacagattggaaactttattagaaaaaagccgtatggggacaatttctgaattagaaaatagcgaattagaagtttatgaacaattagatcaattaatgattttacttaaagctagagcttacagtatgatgaaaaatgaccaataatttaatttctgctaatctacgtcaattagtcattgaacgcgctcaaggacgttgtgaatattgtttaattcatcaaaacttttctatttacagccacgaaattgatcatattattgccgttaaacatggaggtaaaactttgtcagaaaatctggctttatcttgtttaccctgtaatcgtcataaagggtctgattttgctactcttgatcccaaaaatggggaaatcattcgcttatttaatcctcgtttacaaatttggacagaacactttactataaaaaaaggagaaatcattggtattacttctattggtgaagctacatcacgtttactgatgtttaatactgccagcagagtgcgatcgcgtcaattattaattacacaaaaactatattatctttaataagaggtcaaaaaatggctttcagtaattacaaaaccatcggtgaagtcctcaaagcttttcaagttacctataccgaagccaattttatcagcgaaattgcctttaatatttctaactacttccgcgaagatttagaattaatgatgcgggatgcagttgttgataattcagaatttgctatttgcgaaaatcttatttatcccgttctcaaagaagtttggaaaatctaccggcaacattttattttatggagtcatcaatcgttaaactatgatgaaaaactatcaggctttcctgaatatattttagctaaacgctcccctttgggtaaagttgtctttgacaaaccctatttcattttagtagaagctaaacaagataactttgaagcaggatgggcgcaatgtttagcagaaatgatcgctgctcaaagattaaatggagaataccaaattattattttggggattgtttctaatggaataacatggcaatttggaaaattagaaaatgaggtttttactagaaatagcacttattacacaattcaagaactagataaattatttgctgctgttaatttcgtatttcaacaatctgaattacagttaaataatttagttttatctgctgcttaaatttacctgaatcaattaacattatgcacaaaaaattcgtaaatcattgcaccatagatttaaccatcatccccgatggtccaattctgataaaatctggaaaagaaggtgcagatcccacaaaaccagacatggaatttgtggaaacctatcacgctggaggacgtactatatacttacccggaagcagtttaaaaggtgcaattcgcgcccatgctgaacgtattgtcagaacagtaggaggtgataataatacccaaaaactttgggcaagtgacccaatgaaaggtgattatttacctaaaaacttatcaagtcatgaaatctataaacaatcatcatttactgatcaaatgtttggtaatacttctattgcaagtagactcagaatagaagatgcttatccagaaaaatcaaaaccagtaagaaccgaagaaagaaacggtgtagcaatagatagagtatttggttctgtagctgtcggtccatttaattatcaagtctgcactgcgggagaatttaaaaccaaattacatttaaaaaacttcaccttagcgcagttaggtttaattggtttagtattgcgtgatttaaacgatggttggtttggtttaggttttgctaaatctcgcggtttaggaactgtagaagttaagttaaataaagccatcgtgcagtatcctgggtgtgttttatcagaggataaacaagaaatttgcacttttggtactaacaaaaaatggcgaaatacttttttattaggtgtaggtgaatttttaaccgaaaatgatgcaaaatcttatggtttccctgataaagatagtcaagatacacctgttgctgctcaagaaatggctttaggatttggtgtagaattaacttggcaagaaagaacagttaatgatttatttgaacgtggtgttaggtcttggagtcaagtattagtttaggtttaattaggtgcaaaatgacagcttttgttggatataaagaacatcctgtatctgttgagcatttattagaattaatcaataaatcaatcacagataatacctattattttctacgttggactcatagagtcagtggaattaataaattgcagaaaaactcaattagtgatcaatttcaatttcctatgttagaaggacaaatatttaatgatcaatttgaactaagatggaaatacaaaaaagataatacttatgaagttttacttttaagtatgaatggtgcaaattcagaatttaaaccattagaaaaagaatggcaaatagaagaaagaaatgcgtatttttatccatctacagaaacccgctttcctaaaggttttaattatcccaaacatctagaaataaaacaacgatattttctagatcaaacaactgcaacagttcattttgtagcactcacattataatcataaacatgacttaccaaccaccgaaaaaaccaattcctaaaagtgcatctcagtcagaaaatgccaaaccttataattttgtatcatttcccaaagacagacctaacttacagcgtccctatggacatcataaatatgatcaaaatcgtttgcacggtacactttacctgactttaaaagtgcaaacaccccttcatgtttccacaggtgcagtagttttaggtagcgatattggcacaaaaatttccttaattaaaacaatggtgcaaggagttgataataaattatcaattcaaggtagttctttaaaaggttgcattcgttctgtatatgaagcaattactaatagcaccttacccgtaattacatctagatataaagataaaattcctccagaacgtttaccttgtaaaaataaagaaaaactttgtccagctagtcgggtatttggtgcattagattggcaaggtttgatagaatttaatgatgctaattgtgaaatagtcaatttctccacaggatttatgccttctttatatcgtcctcgtccagaccaaactaaggcatactttattaatggtaaagtagctggaagaaagttttattttaatacgtctaaagcgattgacaaaggacaaaaagaaggaatttctgtacaacaagcaggaagagaatatacatttaaaacagaaatacaatttaaaaatttactttctgaagaattaggaacattactaattgttttaggacaagacaaaaaatatcccatagctttaaaagtaggaggtggtaaacctattggaatgggaaccatgacagtaaatgtagataaaatcaatcaaccgcaaaacctgaaacagcgttattcagcttatgaaataagtgaatatgacgaattaactggagtcaaattagtgcaatttatccagaaatatattcaaattgcacatacacgcttgattcaaaaacagcaactagaagaacttgcggctattttacgttatcccagtgatagattaccaccagaaggaatgtattaattatgagtttaacagatggacaatgggaaattgctcatgcgatcgcacaaactttagtccaagaagatacagatgtcaatgaagtaggtaaaatccttgcatatctgcggacaatcattgataaatctgatgctacatcccgatttttaacatacctcaaaaccttggttaaagatggtaaacaaatcggacacagtggtaaaaccttgggatattatcgcaatatagaaattacctgtagtcagtatttcaagaataacagtgatgctcataccatcctgcaaattttaggttgggtatctcgcttaatgcgatattacaaagatgcaggtgttcctgtgggggaaattaaagtacctgctgtgcaaattgcaaaaccaatagttgaagataaattcaaaatcggtgaaattgtagaagcaacagtaataaaaattgacaaacagcacgttcaatctggtaaaaagactaaattaagaaccataataacttatcaaattgaaggttctgattgtcaaccagatgaggaagtgaataaacaagaagttaatctgtctataggtgatgtagtaaaagtaaaaattgaaaaatgtcaaggctcgtgtatcagaaaagtaaaaagagttatagaataaatatttaaatcataaaggatatttactaaacgagaatcctttttttattacactattttgggtaaaggttgtaacatagaatctatacccaaaatttcgctttttggtgtatgtattctactaatccagtaaaaatgtatgtacaagtttaaccaatttatattactaggctcaacgcctccaacattcgctaaagcaactgaaccaacttttcaaacaacacacagcatagcgactgaatcaacttttcaaccagcagacagcacgacgtttttagagaataggatacagaaaaacatgacatacccagtagagtatataaatgagtttggggaatggtatgaagaactggatgaaggtactcaagactccatagatgcagtagtagagttacttgaagaaagaggaccaaatcttggcgctccatacagttctgctattaacggttcttgtcatcaacatatgcgagaacttcgtatacagcataaaggacaaccataccgaattttgtatgcttttgatcctcgtagaactgcaatactacttctaggtggtaacaaaacaggtaacgaccgttggtatgtagagaatatacgaaaagctgacaagctctatgacgaatacatacaagagcttgaagatgaaggattaatatgaagacaaaacctttcagcgaattacgcaaacaaatgacacctgaacgccgagcaaaaaataaaactcgcgccaaactgatgtcactccatcttaccctcttagaactacaagagtctctaggactgaaaccagaggaaatagaagcagacttcaacaattttgaagctactactgctgaattagagaaccaagaggatattcaaatttccactctttctcgttatatcaaagctcttggtggtaatctcaaaatagtagctcattttcccaatgaagaaattactcttgctcaatttgagtaatagttaattcacagttaattcacaaaaattaccctcatcaatagcttgacttttttttcatgtcaagctattgtttattgatactagagagtttaagttttcccccgcaaggggattgaaacacgcctctagtatggtgattgaacagttgtttcagttatcaccacttccccgcaaggggattaaatctcaaccacaaaaacagtatagtaattaactaaaaaattctatttaaactcttaacattaatcagagttgagccaatactgcttgatgaagttttcagaggatatcaccatcagaatcagaattaattgatatcccttattacccccatatcaatctttatctcactcgaaaaaaggtgaaagtatcatgacaacctgcaacggagttaacgctgcaaacaactccgaaaaaaaacaagaaaaaaccattgaacaagcaatactagacgctattgccgaagccagagaagtttgtgatcaaaatggtattaattcccctaactgtgcagtagcttgggatatcgtcgaagaattgcaagccgaaaaagcccatcaacaacaagcaaaacatcgtcagacatccctagaaagctactgtgaaatgtatccagatgctttagagtgtttaatgtacgatttgtaaaaattgatgattgatgattggtgactggtgactgggtacaataaatatttctcgtgatttctcgttcccatactctgtatgggaatgaattattaaaggctctgccttgagtaaaattagagtcagagactctatgatagcattcctagaacgtcttgtaggggcgaagcattcgggtgataacctatcgctgaaaccagttcatattctgtccgaatgcttcgcccttacgattaatgaatcggtgttctagtcagagactaggaatgagtaattggtaattagggtttgctgaataaacctaaaaccttgatatatcaaaggttagaggctgataaacacagaaattagtccaagggttttgaagggtataccggaaaaagtgtgcattttttgggatttcaagagacggcaaagaaattttcacatctcctcctgactcctgactcctgactcctgactcctatgccctcacggaaagactttctcagcaacccctaattaggttatccatcttcccagtccccagtcaagagtccccagtcacctaaaaaaagcgatcgcactcccaaaactcagaaatgcgatcgctttttcgttgcatttatttgtgtaaatttcttaaccaagcaaatgcaactgagtaagaattgtactcacaagatgatgagtaattggtaaactatcaaccaccatccccaaacacagcaacatcatgtaagagatggaatatagaaacaactccctagcaacagttttatcctctgggttttgtaacaaccgccaagacttatggacaaataccccacccaaagtcaaagcaattaccacatacacaataccactagcgtgtaaaggatagaacagtaatactgtagcagttacggtaattactgtgtaaaaccaaatttgtctcactgtggctttatcacctgcaaccacaggtaacatcggaatccctacttttgcgtaatcatctcgaatcatcaacgccaaagcccagaaatgaggcggagtccataaaaagacaatggcaaaaattaaccaagctgcccaacttaaagtatctgtcaccgcagcccaaccaaccaaagctggaatcgcacccgcagcaccaccaatcacaatattttgagtgctgtggcgttttagccaatgggtatagaccaagacataaaaaacgataccagaaaatgctaaaagtgcagccaagagattggcgaaaacagccaagagagtaaaagaacccacagccagagcgatcgcaaaaatcaacgcatcacgaggctgcaccctaccagaaggcataggacgatggcgcgtcctttccatgtcataatctatatcgcggtcatagatacaattaattgtttgggcgctggcagcagccaaagtaccaccaagcagcgttactaacaatagccaaggatcaacttgccctttagcagcaatccacatactaccagccgttgtaatcaaaagcaacggaataatccggggcttagttagctgataataactttgaatcacctgaaaaaatgtatcgtggtggcgacgagagacattagtctcaatcatgttagctctctctctttaatttgttaataactgagggaataggtgactggggactggtgattggggactggtgactggggactggtgattggggactggtgattggggactgggaggattaatcacccattagccattacccaactacccattaccaattacccattaccaattaccaattaccaattacccattaccaattacccattagcatgactaaccgtgctgtcacgcaaagctaaaaccgtaaataccaccaaagtacccaacaaagtagcaccgacagcttggtgagttacggtgagaggttcgacttgtagatgtaaccggaaggtggcaacacctaacagcagttgtaaaatcaataacccacctgccatatttgccaattttcgtaaagcaggatgtaaagcaggtgtacgccaggaaattaagacaacagctaaaattgctaacgttggtggtactaaaccaaaaatgtggctatacatcacaccacaaagttgatccccagcaaaacactgatgcaaagcccagcgagaacctaccaaagcgccgagtaaactttgcagataaaccaaaaccgcagcaaccaaacccaaccaaggcagttttcctacagttcccgtaccttgataagggctaagtgccgtaccaataactaaaagggtagtgaaaaataataacgccgttcccaaatgggcagtcacaatatcaaaccgcaacaattcggtaacggtaagtcctcctaaaatcccttggaagacaattaaaaacaaagcaaaagttgcagcccaaggcaaccagtgaggtaaaacccgacgatgccaccaggataaaccagctaaggcgatcgcgctcaagccaatcaaagctgcatctaatctgtgaaaccactccaagaaaacctggagattcatttgtttagccggcactaattccccataacacaaaggccagtctggacaagcaagaccagcattcatcacgcgggtggcactgcctatagccatcaaaattaaagtagctatgcaaattttccacaccaagcgacgaatcacttccttggggctgttttgtggtgcggccgcttcattttgttgttctaggacaaattcgttcatcaaagataccttatcaccgcttgaggtagaagctatttaaaatagtctgttgacctaaattgcgtgagttgaaccgttggcaaatggagatgtggggagatggggaggcag

SEQ ID NO: 52 - DNA, 37776 bp, Sphaerospermopsis sp. LEGE 00249
  LEGE00249_67
tatggttttgggagtaacaggagtaatttctgtgttctcttctgtgatgaattctgtaattttcgatgtttgattttctgaggtaatttgattatttgcttcagaagaatttaattgaatatctggtgatatggttttgggagtaacaggagtaatttctgtgttctcttctgtgatgaattctgtaatttccgatgtttgattttctgaggtaatttgattatttgcttcagaagaatttaattgaatatctggtaatgaagatattgcttctgaagtattaacattttcatcttctacttctctttggattgaattttcattgacattaatatctaaaatatcaacgtcttccggtgttttactaactattgtcggttgatgagtggtaaagttattattgttattaaatatattaatttcttctttaatattagatgtttgattttccaaaatagaaaattctgaggaagcactgttaatactattaatggtattattaataccatcagtttctcgatcttgttctctagcttgtatagatatttccccaatttctataatatcagattcattgaaaccagttattaaattagatgataaatctgtaatgacttgtagttcatcatcagtaatttgttctgataatatagagttattatccaaattgttagagttgatattggatacattaccatctatgatattattatccaaatttcctaaattttctgaatttattaaattttctgaagttgttggttgctgtataaatggagaactatcagtgaagttatcagttgacttaaacaagttcaatatttcagattgaggattatctgtaatcaatgaatttaaattttcttcagcagtaggaggatgatttgtactttcatctatcacctttgtaactttcacctgtttaactttcttggttgtagatgatttagtagtttttttaggttgagtttttttggtttgagtttttgcagaagatgtttttttcggtgatttctgcttttgggttttccgggttgttttagtttgaggttgaataggtatttctggtaatatgtcattacttaaatcacttaaattactgttggcaatttgagtttgtaaaagatgggaaatattacctaaattaaatttagtatttgtatctgtgatggaatttgtactattttctggtataattgtttctggtgtaattaaatcataatttactgattccatttctggaaagtcactatccatatctagactacccagatcatcatgatctgaatgattctctgtaattagtgtatctatgaatggttgacgtttacgatttaagaaaagtttagatggcttaaataatggtttggatgtgactagaggctgaataaaattgttgtgtttaaaattgctgtgttgatgatgaaaacctagataagatttttgcccaagggtattaacttgagtttctaataatgattgaataatttgcataggattgacaactttagtgaacaatattcaaattaatttgatgtaaaaaatccagatttcatccgtgatgtaggattaccgcctcctttgtcttttcctacttttaatccttcataagctaaagttaattcttcaattgccactgcattaccatctgcttgtagtgctggtgttttccaagcaataggaacagcaccgattaaagtccaactcatcatagtttcgccggcttgattgaaaactaaaatattcacattacggcgagttgatgtttcagtaaatactgcgctaatccatttccaaaaaccttgattatctgtaattcctcttttgagagttacatctgaaaattctgcttgacctaaatatattctctgttgatcattaactccaccttcacgaaatacatttttcttaatttgcattcctaaaccagaacattcactaaaagatgcagcaatagatttatctatttctacataaaatcggttggtggtgacataatttaattcgtgagtgacattaccattttgattatttcctgccatttttaccacctttgattaccataaccattaactctttctcgttggatacgcacatcttctagtaaaagttgatatacttgttctgtgagtttgtttaatagtagcgagtcctgaagatacttatcagctaatttagcgatttctgttacatcggatgcagaaccagaacccgcatatccagcagtaccgccaatatcactattgggagtaaaattttttggcttttgtggcttgttggttgagtccataactaaaactcaaagttagttctaaaatccaggctaaaggtactggatgagaatcaaaattagccaaaagtcgaacttaatttttactcttattggactgatgttgtattgttttgtgagagcgatcgccctataatggttgtttaaactggcaaaatctgaaaaatatttattcatctactgctgggacattaggagcattatcatgagggaacgcatattccaagctaaaaaagctgcttctcccgtctccatatcaacactcaaacaaccaacacgcggttttggtttagagtcatggaacgctttacctccagccatgacacgggtgcaacccctgaataagcctctcactcacgatatcagtaaaatatcactccgtccccaagcaaaactctcaattagtcaaccaggagatacttacgaacaggaagcggatagtgtagcgcgacaagtgatgcaaagaatggcgctgtctggaaatcgtcaatctattcaacgtcaagaaattccagaggaagaggaagaactgcaaatgaaacctctggatattagcactttgcaacgtcaggaagttccagaggaagaagaactgcaaatgaaacctctggatattagcactttgcaacgtcaggaagttccagaggaagaagaagaactgcaaatgaaacctctggagattagcactttgcaacgtcaagaagcaccagaggaagaggaagaactgcaaatgaagtcgatggtgcagcgtcaagctaatggtgggatgacagctacagcagatttagaaacctccatcaatcaagccaggggaggaggacaaccactaggggataatatcagagaaccgatggaacaggcgtttggtgctgattttggaggggtgaaggttcacacagatagtcactctgacgggttgaataggtcaatacaagcgcgtgcttttaccacgggacaggatattttctttagacagggggaatataatcctgggagtcggggcggacaggagttgttagcacatgagttaacccatgttgtacagcagaatagaacgctcaatactctacaaagccaatcattgtttacgcatcaaattcaaaggaatggagaaaaaaaagaccaagaacctagcggaggctcattgagaccggcattaggaaaagaattaatgaggaatatgttcggatctaattggttcgctacgggagtttttaaagcgatgaattttgccatgtatatagaagggcaaaaattaacaaaagagcatcacgatgtactccatcagagcttaatagaaaataaaaatggtgtactaactactttaattaaagaaaatccccatgtaatcaaatctcaaggtcagacccctatttacttgttaggaaaatatttagttcacaaaccgctagaatattacctaaacaatcaaaatagaaagcaataataacagctaacttgcgcccctacagcatgataattggcactaacaatttccgcaagacgcgatcgcctcaaaatataatttagactttaggctaattacttacagagtgcgatcgctatattctagatatttgtactggcaaaatattgatccacatcacggcttgggcatgaggagcgcaacatgagagaacaggtaagccagggcaaaaaagctaccacttctgtctccatactgacactaaaacagccaacacgcggctttggtttggagtcatcaaacattgcgcctcaagcaactccagaggtggaaactgtggaaactgttaacgaacctctcacccacgatatcagtaaaatatcactgcttccccaagcaaaactttccatcagtcaacccggagatttttacgaacagcaagcggatagtattgcacaacaggtaatgcgaagaatggcgcaaccagtcaaccgtcattctatccaacgtcaggaaatatcagaggaaaaagaagatacagaaaaagaagatacaaatttacaaatgaaacctctggttaattttgttacgcctttagtgcaacgtcaacaaatgccagaggaagaagaattacagatgaaatctgtgtataattaccatctttcctggttgcaacgtcaacaaatgccagaggaagaggaagcacaagaggaagaaccagtacagatgaagtcaatggtgcagcgtcttccaggtacgggtggaatagctgcaacttcagatttagaaacatcaattaaacagtcccgtggtggtggacaacctctagctgatgatatcaagcaaccaatggaacaagcgtttggtgctgatttcggaagtgtacgtgttcacactgatggtaattctgataaattaaataaatctatacaagctcgcgcctttactacaggacaggatattttcttccgtcagggtgaatattctcctggaagtagtacaggtaaggaattattggcacatgaattaactcatgtgattcaacaaaatggcaattctgtacagagaaaatctgtcaatttagaattaaaatcaaacaaactatacagaaaatctactgataatgggcaaactctcccactgggggaaagtccccaaccaagtacccaactggaaggggataaccaaaatcaaaaggatgaagtagaaaattctgaaaacagcgaacaacaaaatcaagcaacaacagaaaaccagcaaacagcatccaccccaccagcagcgggagagaatggaatagcagaaccaccgccaaaaaatgaagatgataagaaagtagaatctaccaaaaatacagcattaaatcaggaaaaacagccagatttaaaagataataacgctaattcgctaaaaaccagttcccaggctcaagatcaacctcaaggtagattaccggaggaaataacaagacaagataacgtacaattaccaagcaaaaatgtaaataatataacgactaaagcaacaggatcagtaacgggtaatggtgaaaaagcccctgcttccccggaagctgatccagaatttcaagcagtaattaatactacaaaacaagtaggtgttaagcaaaaagaacacccaccagctaatactgaagcccaggaagcgcaagatgcggctgaaccccctggaaatgaagtagagagcaaagcgcaagctaaccaagtgggtgagatgggacaagctgaaacttcaggatttgatgctggggctttgaaagttaaactgatggagcgcattgcggatatggctcctaaaaatcttaaagaagcggatgagtttaagaatggcaataaattggattctgttaaaggtgatttaagtggcaaggttaaagaagaaaagaaagaatcacaaggtgatttagaggagaaaaccaaggaaaaaccagatacaagcggtattgaaaccaaacaagtaacgcctctaaccgcaaataatccaggaacaccaccagcaaacattggtgcagataaagccgcacctaaatctaaaggtcaaggtgaaattgaagcacctctacaacaagaaagtcaaaatcttgaccaacaaatggctaatgccaatattactgaggagcagttagcaaaatctaatcagccggagtttcaagcagcactgtccagcaaaaaagaagctcaaaccgatgctgtacaaggacctgctaaatatcgtcaagaagaacaaggaatcattgccaatgctaaggcgacggctgaagctaccgcacaacagcatcttcaaggaatgcacggtattcggaatcaaaacttgggacaggtaggagaacaacaggtaggaactaaaggcaaagatgaacaagcacgggcaaaagttgctggtgatattaataagatttatgaggggactaaaaccaaagttgaaaaaatcctcaatgatttagacgggaaagttatcgaagcgtttgataatggtgcggctaaggcgaaaaaagcctttgaggattacgttggcaaacgcatggacgattataagagcgatcgctatggtggtgcgtttggttggacaaagtggatcaaggatcaatttgttggtttaccttctgaggtgaatgtcttttatacagaagggcgggaactttacattaaagaaatggatggggcgattaataaagtagtaactattattagtcaaggattgacccaagctaaagctgaaatttccaaaggtaaacaggaaattcaaaattacattaaaaaattgccccaagatttgcaaagtgtgggacaggaagcagcagcagctattgaaagtaaatttgcggaattagagcaaagtgttgagaataaacaaaatgagttaattgatactttagctcagaaatatcaggaaaatctgcaagctgttgatgctcgaattgatgagatgaaagcggcgaataaaggtttgattcaaaaagccttagatgctgttgtgggtgtggtaaaaacaattattgaattgaccaaaatgctaatcgaggtattagcaagggcggcgagtgtagttggggaaattattaaagatccgattgggttcttgagtaatttggtgagtgctgtgaaacaaggtttcctcaactttatgaagaatatcggcacacacttacaaaatggtttaatttcttggttgactggcacaatggcagaagctggaattgaattaccagaaaaatttgatttaaagggtatttttaacctagtcatgcagcttttgggctttacttatgaagcaattcgcgctcaagctgtgaaacgattgggtgaagaaaaagttggccggatggaacaaactgttgaggtatttaagatattagctactgaaggagtaggaggaatttggcagtttgtacaagagaaaattggtgatttaaatagtttggtaattgaaccaatcaagaattttgttattgaaaaagtaattacggcggggattgaatgggtactgagtttattaactccagcttccgcatttattaaggcttgtcaaggaatttataacattgttaagttctttattgacaatgctcaaagaatagcagatttaattcatgctatcttagattcaatagtggcgatcgccagtggttcaattgatcaagcaatcaaaggtgtggaaaatgccctggctaaatctttaccagttgtgattagtttcctagcgagtcttttgggattgggtggtattagtcaaaaaattcaaggtattatccaaaaactgcggaaaccaatggaaaaagcagttgattgggtaattgataaaggtaagaaggcgtttggaaaagttagtaataagttcaataatagtaaggtaggtaagaaatttaatgctgctaaggatgcagcagtggagaaatataaagctggtaagcagtgggtggaagataagaaagctgctggagaaaaatggtttgatgataagaaacaagccctgttagatgctacagaaaaacggaaagctcagttcgcaaatactaaagctggtaaagcattaaccagagctaatgatgggttaggtaagaaattagatgctttagagaaaaagcgtcaggctttcaataatagacttgaaaaagtccaagaatggcctggtaaacagttagaaaaagtccaggataaagccgcagaattaagaggaaaagcaggagagaaaattaaaaatagtaagtttggtaagagtgttgggaagacatgggatcaaactaaagatgtggttggtaagaagaaagaagcctttggtaataagttggggtttggtaaggttaaagagaaagataaagatagtcaggatcagaaagctaaaaatagcaaaactgatcaacgaacttatgaagagaagaaaaatgatcttgatttagctttagcagaggctgaacagttaatgcaaaatgaaaacctgtcatttaaagatattaaaaagctgctacctcaaattaaagctaaatatagaatgacttcatgtaaactggtcattgataaggatactaaagataaaacaactgctcatattgaggcagaaattaatcctaaaaataaaggtaaagaacacaccagaaaagatcggcgtgatattcaatctcatgaaaatttaggaggtcatacagatgagcgtcacattagtaagtcaaaaaattggctaaagcagagacttaatagcgaaccagagatagaaagtgcgtcttctttttacaatgaaaattatgctaatctcactcaaggaaaatttgttaagcagtttcgtaaagagatagaagcttggctaaccagtggagaaggtcgatttgtaaaagtaattgaaatggatcaatcaattggtatagtagtagcacgcagcaagaaaggagatcccttaccagcagtgacaacaaaaaaagcacggttagtgttggttcgtgataattcttctcaaggttggcatatcctaacgtctttcccagaaaaatagctaacaggtatatatgactcactacgaacacctttatccaaaactcaagtattttttcagtgcttattttcatcaagattggaaatttgtttatgattggcagggagaaaaaccatcatttcaagtggttgtacgtgactttagggagagtaatcctcaagaaacagttatcaaagctactgaagagttagaacatttgctcaaacagaatcttacagaggatgatctaagtgaaattgtgacagataaactcggatctcaaatttacgttcatggaataggactaacctataaaaaatttttggaagctatcttgactattttgaacgaaaggcattgatttacagctattttcagctaagtgaacgctctgagggggtaacaaacaagctaaacagatttctgtataagggttataagttacaatggccagttttgcttgagtaagttctgatataaaaaaatgcttacttcgggtaaacttaatgattattaactatcaaaaaaagaccctatgaaaaaaaatacagaaactcatcaaataaacaccaaactaaccctacacaacccctcccaaacccccctcaccctgcacgcaatttccctatctctcaccactcaaaacaacaacctcatagaatgtcgtctcaccttccaactcaccccccaactctaccaacgcatagaaaaggaagcattatttaatcttaaaccagaagtccgtaattctgattctgtaaaattcctccctgaacctgacatcaccatcgaaaccagtcttaaacccgacttattgcccctattaacagaacacgctaataacattgaagaaactgtaaattacatcctgaaattaaaccaagaacaaccagaaaatatcctcctatctaccgaaagttggttagctttatctgtcaaacagcaacaggaattaggagaaattggttatcaaactctttggtcttatattagtccagaaaaccttactcaaacagcaacttccggtgaacatattactgaaggaattatcaacttttttcaagattggactgaagcgaatttatcaaccaaaactcaagaaactgctaccaaaatgatggaaggaattaatacatttttaacagaattaaataatattaatccagaagaaattagcacatcatctacaaatagtaatatttttgaggaaatgatcaatttcttcactgctgatgattggccttttgtacaactttcaggacaaccggctttacaaataagttttcagggtgaaaatggtaaatggaattgttacgctagagccagagacgaacaacaacaatttatcttttactccatttgtccagttaacgcaccagaagaaaaacgactagctgtagccgagtttatcactagggctaattctggcatgatgatcggtaattttgagttagattttagcgatggagaaataagctataaaaccagtattgatgtagaaggtgatagaattagcagcgcacttattaaacgtttagtttacgccaatgtgatgatgatggatgaatatttaccagggattttatctgttatttatggtaatgtatccccggtagatgcaataactcaaattgaggcttaaaccatcaaaaaaatcatccatctgttgtaggaacaattcatgaattgtccctaccataattttcagttaccactgactaccaatcattgtaaaagcagaccaatagtaaggatgggagagattagcattctgtaacttagtagcaattgtccgaggtatatcaatgttacccctaagactaattaattgatttccttgtactttaactttaccttgaatcatagctaattgtgtttgtcgcagtgcttcagatttaattggtgaagtctttaattggcgataaaactcagtcatcaaaaccatagttccattatcttcaaccaaccacaaactggcaagtgctgattttacacctgtttttaccgctaacccagcaaaacctaattcagcattctcatctccaaaagctgatttacaagcacttaaaactagtaattccactggtggttcatcccatcccaactcactgacttgatcaaatggcagtttaccattatacaactgaatgtaagaagcactagcatcaccacgagcaaattctgcatgagttgctaggtgaatcatttcaaaaggtttgttagtaacaggattcttttgacgttgagtcttgagattttccagggtaaagctttgattgagaaaagatttaccattccatagattggcgatattatcaagctctactggaacagcttccaacttattttggttttggtcttcggcaaattcactagctcccattgccaaaacttgagcgtttttaatatttgaataactcatcttggtggcactggcactgggtatgattcccaaactgtatttttcaatcaaaaactgttgaccatcatggagagcagccataggaataaaacgtaaaccagcatccaaaacaaaggacaaattattaacaccctgtttttgtaattccgcttcatagggtgcaattagccatttatataattgctgtgctggttctaaataatttgtactattgacatcttcatattcatcaactccattgtacagttcatctgctacttccttaatcttggctctggtagcataagaaacttgtttacgaatagttttaccttccgaggtgaatatggttaaatacagtacatctttatcttgtgatgtgtcatcactaggggcaaaacccacataaacaatagccgatttaatccctgtttgtgcttcaatttgtttcagttcagcttgaatatcagcttgagattttctaataaatgatctgccagaatatgactcaatttctgccgtatatcgctcctctagtgtagcaacatctgtatcaactgtcactgctggattactgctaactgatagcagacctgatatatctggtactggttctatagttatgctactattagaattggtaattatttgaatgttgccttgagtaacattgccttcaaaggatcttacaggtctgatattgttgataacacctcctgttattgctgctgctgtacccagttcgctgctattaccaatgataaataatgtattaccatcacctccatgtcggatagtgacagaaccattaccatcgccgcctattgtagaaatactagaacgaacaccattgcgagcgtcaaagctgcctgtagcccggaaaaatcttctggttgtaatatcaacattaccaccaagtccactccctaatgcttgggtattgatagcaaaaacttcaatatcattatcaggatctaacatgacattaccaccattaccagtgctagaactggtatctaagaatccggttttaattctgttttttgcttgaatattaatatttccaccttgagttgtgatgttttgtgttgtcactgctcctatattacttttcaggttgactttatcatttgtggtgtcgatttttccagtattgatattttgattggctgttaggttagttaaaccacctctgatatcgttgatactaattccaccagatgaactgttaagattgatattttcaccattaatattagcagtcgtgatattttgactggctgctaaattaattaaatttcctgtaatgtcattggttgaaattcccccaagggtactggtaacattgatattttgaccttgcgttgtaatattgctagtgctaatattttgattagctaataaattaattgaggcattatttaaacctgtaattgtagcagttgcagagattgaacctgtgccattaggtgttttgatagttgtggggtctttaaatgatacagggttattaatagcaatattaccacttccgtcattacgtccaatagtaatagaactaaatccatctgctaaacctgctatttctgcacttgttaagtttaatgttcccgcaatttcattacctaaagtgatatttctgtttgcgtttgcaggttgaatggttaaatttcctgttcctgttgtggtggtgggtaattctggtaatttgatatcatctgctgttaatgtgacgttattatttcctgctgctacattgccattaaattctatgtttccactattggattttaattcttgattactattgttacctgtgaggttgacatctccattgtatgtttgatttcctgctgttgtcatattgttggcaatatttgtatgtgcagcatttgtggttaagctattgacatttactgcattaccaaatgtgagatttcctgtacctgtgttcagggtgaaatctgtggttaaaccattaattgtgctgctaaaaagaatatcattgttggtagaattgaaggttttagcattattccctgtgaggttgacagcacctgtaaattgttgagttcctgtggtgataatattgttggcaatattggtatttgcagcagttgtggttaagctattgacatttactgcattaccaaatgtgatatttcctgtacctgcattcagtgtgaaatctgtggttaaaccattaagtgtgctgctaaaaagaatatcattgttggtagaattgaaggttttagcattattccctgtgaggttgacagcacctgtaaattgttgagttcctgtggtggtaatattgttggcaatattcgtatttgcagcagttgtggttaagctattgacatttactgcattaccaaatgtgatatttcctgcacctgcgttcagggttaagttatgatttccattaacagtaccacccaataaaatatcacctatactcgcacctgtattgaggttaatatcatttcccaagattacattgttgggtatagagatattctgattatttgtagtgatattcgcattgagattagttgtggttgcttctaatgtaattgacgcattagatatacctgtaatttgactgttaatttcaatattcccattaggtgatttgatggttgtggggtctttaaattctacagggttattaatagcaatattaccacttccgtcattacgtccaatagtaatagaactaaatccatctgctaaacctgctatttctgcacttgttaaatttaatgttcccgcaatttcattacctaaagtgatatttctgtttgcgtttgcaggttgaatggttaaatttcctgttcctgttgtggtggtgggtaattctggtaatttgatatcatctgctgttaatgtgacgttattatttcctgctgctacattgccattaaattctatgtttccactattggattttaattcttgattactattgttacctgtgaggttgacatctccattgtatgtttgatttcctgctgttgtcatattgttggcaatatttgtatgtgcagcatttgtggttaagctattgacatttactgcattaccaaaggttaaatttcctgcacctgcattcaaggttaaatgactattaccgtctacaagttcattaaaggtaattccatttcctgttaatgtggggttattggcaatggtgacattatcgttataagtctgacttccagtggtggtaatgttgccatttaatgatgttgttccacctgcatttgttaataaacttgcagcggtaactgtgttaaatgcggttatccctgtactatttgcaataatatttgctaatgttacattgttaccaaaggtgagatttcctgcacctgcattagctgtaaaatctaacccagtcccagtcagggtattattgaatataataccattgcctgtgaaggtgctgttgttgaataaagttactggactattataagtttgtagtgcggtagtgttgacattacctttgatatttatattattgccactagctgttaaagtgtttaacggtgttgtactaccgacatttttctcaaaggttaaattgcctgcacctgcattcaaggttaaatgactattaccgtctacaagttcattaaaggtaattccatttcctgttaatgtggggttattggcaatggtgacattatcgttataagtctgacttccagtggtggtaatgttgccatttaatgatgttgttccacctgcatttgttaataaacttgcagcggtaactgtgttaaatgcggttatccctgtactatttgcaataatatttgctaatgttacattgttaccaaaggtgagatttcctgcacctgcattagctgtaaaatctaacccagtcccagtcagggtattattgaatataataccattgcctgtgaaggtgctgttgttgaataaagttactggactattataagtttgtagtgcggtagtgttgacattacctttgatatttatattattgccactagctgttaaagtgtttaacgctgttgtactaccgacatttttctcaaaggttaaatttcctgcacctgcattcagggttaaatgactattaccgtctacaagttcattaaaggtaattccatttcctgttaatgtggggttattggcaatggtgacattatcgttataagtctgacttccagtggtggtaatgttgccatttaatgatgttgttccacctgcatttgttaataaacttgcagcggtaactgtgttaaatgcggttatccctgtactatttgcaataatatttgctaatgttacattgttaccaaaggtgagatttcctgcacctgcatccaaggttaaattactattaccatctacaagttcattaaaggtaattccatttcctgttaatgtggggttatttgcaatggtgacattatcgttataagtctgacttcctgtggttgtaatattgccatttaatgatgttgttccacctgcattagtcagtaaacttgcagcggtaactgtgttaaatgtggttgtcgctgtactattagcgataatatctcttaatgctgtcgtgttacttagagttatatttcctgttaaagcattgactgttaaattgccactaacattactattccctaatgtgatattatttacatcttgtaaagtgacattatttcctgttaatacactaacttgattaaagtcattggtattgttgtttaaggtaatattttctcccgttaatgtagtattccctgctactgttacattggtatttaatccttgatcaatatcgccacttcctgtaatatttgcgcccgtatttgctgtatttagtcttaatgtgccaccaatattagagttatttaatactatggcatcattaccataagtaccattaaatccaaatcccgttgctttactattgactgttagattacctgtaatagtttcatttcctaatgttaccactcctactctatctattaataaatctccattgttagtagttagtcgggataaactattattatttccagtggcagtaaaactattagctgtgatactggcgtttcctgctacccgtaaattttccccagtaaattgagtgacatttccagcacttgttaaggtgagtgttcccccgattgtactattacctaatactgtgccgttagcattgttattagtaacagtcacgttgcctgtatttgctaaggtagtggtgaagttagcattattggcaactgtgatacttgtacctgtattttgagtaattgttcccgccgatgttactgttaaattgccactatcttgaatatttcctagtacgatattgccggcattactagatatattaacgttggcattggcagatgtggagttggctctaatattagcattaagtatgttaattccttcggctataccattagcattagtgttatttcctgttaatgtgatatttccactatttgttgatacattaccttgtacctgaatacctctagcactgccaccattacctgctgaagtacctattaaactaatattgccgctatctgaggcgatgttactaaatatgacaattgctggtgtattaacgctagaattggtgttgtttcctgtgagggtaatatttccactatttgatgttattggtgcagtggattgtaaagtaatacccctagaattggtaccagcacctgctgaagtacctgttaatgtgatattacctgcattagaagtgatcgcacgatttgacaaaattccgtcggctacaccattagtgttagtattattgcctgttaatgtaatatttccactacctgttgatatcactgttgcagtattggctagtaaactaatacctctagcaccgctcatattacctgctgcaatacctgttaaggtgatattacctgtatttgaactgataagggcttgattactgaaaattcctgctccattaccaagagtagttgtagtactatttcccgtgatggtaatactaccactatttgtgcttacattagatgttatgctcacgcctctggcattgttaccagtacctgctgcaatacccgttaaggtgatattaccactatttgaattgatggcttgattactgaaaattcctgctccactagcaccagtatttgtactatttcccgtgatggtaatactaccactatttgtgcttacaggggatgttatgctcacgcctctggcattgttaccagtacctgctgcaatacccgttaaggtgatattaccactatttgaggtgatcgcactatttgaccaaattccttcgagtacactagaagtgttagtactattgcctgttaatgtaatatttccactatctgttgatatactaccttgtaaattaatagaagcggcactatttaaaccatcacctcttgatgtccctgtgaagctaatactgccatttcctgtactaatattcactcctgagtttacaagtattcctggggcattatttgatgtatttcctgtggcggttaaattacccccatttgttgttatattccctgatattgatactcccccttcagtccctgcattttgactatcgcctgttaatattacatttaatggatttgctgaactattaatattgccattaatattcactctaccatgagctgttaattctaatgttgatgtagcaccgctatagtttaaatttgtacctaaggtaatatttcctgcttgtgttccccctgaacctgttgctactgtaacatttccactatttaatgctgtgatgattaaatctactcctaaagaagcactatctcctgtggcagtaaagggattagtatcaggaatgttggtatttccacctcctgctactatgttaatatctgtaggatctattaaccaagttcccccaatttgtcctgaaatatctggcactgtagtaatgtctaaatatcccttactactggtttctataaatccgccttgattatttcctttgacacttaaattaccatatattcttgtggcttgttctgaccagactatgatattgccgccattaattccttcggctttaatattactatttggatcaatataggtaaattgggctgtgggtagtgtgccttgaccttgataatctcccccaataaatatattgcccccattagttcctaatgtgcgaatatttccattaaatattcctattttgtcgcctaatatattaattttattattagcttgaatatttcccgatataatacttgtgcctgtttctgtggggactacttgattaatacttgttaattttaactggccattttctactgttactcctgatacatgattcaaattaccccctgttaataattgaggtaatgataacggtgtatttgtatcttgatttaatccgctttgatctataggtaatcctaagcttaataagctgccttcttgggatattctgactaatttttctccgggtgtggctgcaatggtaatattaccatttggggtagatatgttaccagtattgatgactgtaccacctaataaggtgatacttccttgattggtaattaaatttcctgtatttaatattgctccagaattttggtttaagaaagcaaaactattaggattgccggttaataaattataattattctgtcctgtggcgttaaaccaattattgcctacacctatagcattagctgtagtggctgtaaatgatgctggtacatttaaactagcattgttaccgaagataatcccagctggattcatgaggaataagttagaattaccaccagtaacttgaatcagaccgttaataacagaggcatcaccccctgtcaccctaccgagtatattgataatattaggattacttaaaaagttagcagtttgaccttgatttaaaccaaattgctggaaactgtggtataaattttgttcagattgagtaccaccagtaatattaatttgttgacctgtagtgttaactagagtattagtgccatcattggctggggtgatctgtgcatttgctggttttataattactggagataaaaatgttagtaggaagagtaattgattatattgatttttcagcataacatcaatccgaaaattagccataacatgaatcaaaacacatcttccaaacatacatcaatagtttattctatgcaatctcaactttgtatatttttttaacaaaacttgcttcatccgtcacaaattgtaatattttatggttatgggcgataaaggcgataatttaacggaaaaaccagacatctagatatcccataagcttcgacctgcccccataaataggttccataatttcttttctggagatgtatattataataatcaatcggaaaggatgtttcagcggtatcaggttttaaaccgggattaagtaccccaggacacacaggaacttaccctacaggagatttgccctcttgggcgattggtgttaacctgtcctctaatggcgattctgtgaatgtagaatccttgcatctttacaccggagagtgtcaagagtttcttgttggaaatttttactgggacaagcatcctattagaaaaataaatttttattaccccatcactaggggataaacagaaaatgtagtgtacaatttgccaatgactaataagatgactgataatatgactgataatacccaattacctcaattcaatcctcaacaattaatcaccatatattctaagcaagaatatgatgaattatcggatatttttttagaaattatctggtatttcgcagagaatacctattctacaatttcgccagaatgtcaatactttattgatgcttttgtgaagaattttttatattttttcacccagcctgattatatcattggtgatgcttatactctcaagtttattcaggttaatcctactattgctaatttggtagccatatcaaattttaaaaatactgatggttatttagaaattctcaagaatcaacctaataactttgtcaaaattttaactttatattccgctagaaataatgttaattttgatagagatatgttgtttaatactaatcctcatctcgcttgtttatggtattcacattttttgctactttataaatctgctttagttaataaaacagcttattatagccttcgtgaacatttgtcataccatcatgaggatttaaatattttctataatatctcagaaatttgttttggtgctacctatattgacgaaaataaagatcatgaaattaagtataaagttaatcaagctatccaagaaggttcttttggtcaaaatgcacaaattattaatattattaataaacccgatcctaagaaaatcgctatcattactgctctatggtttgataaacattctgtatatcggatcttagcagagtttgttaattctttgaagtccggttatgatgtaactttggtgcatttgggtggtgtgagaaatgatctagatattgagggttttaagggaataaaatatatattttttgaaaatggtagtttaaatattgacgcgatcgctaacaatgattttcaactaattttttatcctgatattggtatgactgatgaaagtatatttttatctaatttaagattagcacctatacaagcttgtggtttaggtcattctgtcagcacttttggctcaaaaatagattattatattagtggtgctaatgtagaaaatattaatttagcccatagaaattattcggaaagattagttttattacctggttttggtgcggtacataatcatcctatttatgatttaagaaaacccaaaaaatcacgttctgaatttattattaattgttcttggtttgcccaaaaagttaattttccaatgctgaacctattaaaagaaattattgataatgctgaaaaacctttattatttagattcttttcgggtggagctttaattaataagaatgattttcttccctttgaaaaagacctggaatcaattttaggaaaggataattttgagttagttcccgtcaaaatgtacgatgaatatatggaaatgatggaagaaggagatctatgtattgaatcctatcattttgggggttgtaatattgtggccgatagtttatatttacgtaaattaatggtaacttttgaaggtaatagatggtatagtcggattggttcacagatgttgagaattattggttttgatgaattaattgctaagaatcccgcagaatatatgaaaatagttttaaaattaattcatgatgatgattatcgcttaaaactagagcgcaaattacaaactgtggatttagaaaatactgtatttgataagtccagtcaaggctatttcaaaaaagctattgattatttaattgctaatcatgaacaactgcaaaatgatagtaataaaaatcccatagttattgattaaaaattgattaaaaagtcttgacaacagcacaggttttcgtttttgtcaaaggtagaagttcagtcatgaaaatcaatccgaaattagctacaacatggatctgaatatgtattctaactgtgcatcaatatttatcctaatttatcctaatttatcctaatttatcctaatttattctaatttatcctatgcaacctcacctttgtatatttttgtatattatggaaaaaatactaaaattttgccatttctcgatatcaagagaacatagcgtgttaatgtaaaaattacaagctgatataaacataaacataagtggaaaaataaaagactaggggtagtaattttatgcgttggtatttacaaggaagaaatttatgtgtatttttcattcccagtacactgctattgttctctgcatcaccaggtcatgctcgatcatctagttcgtttgtattattaaaacaacctgatcatctgctaacacaagttacaaataaaccaaatcaacaatcaaatcaacaactagaatccaatcaagaagtagtaaagaatacggatgttgtgagttcttcagtgttcttagaaatatcaaaaaatcgtttagcacaagggggaaatccagcagataatactaatgagaaaagatttatacaacctgtccctgatgctgaaccactgacaccagaaaatcaaccaatagttccttcagaaaccgaaactcaaactgaaaccgaaactgaaaccgaaacggaaaagattcaagttaataaaattgaagtattggggagtacaatttttaaccaagagcaattgaacaccttgactaaggaagtagaaggacgttctgtaagtttagaagaactgacaaaagtcgctgatgcaattacccaattctatttagatcggggatatttgacctcaagggcaattttagctaactcaacaattactgatggtgtagtaaaaatacagataattgaaggaggtttagagaaaattgaagttgaaggtacaaaacatattcatcctaattatgtgcgatcgcgtgtagcattaggaattaaaaaacccctgtccacagcagatatagaaaaccaattaagattattaagaatagatcccttattttccaaggtagaaggtattctccgtgcaggtactaagttgggtgaaagtattctagtagtcagagttaccgaagctaaccctctacaagctagtttaaatgttgataactattccccaccaagtgtaggttcagaaagatttggtatcaatacggtttatcgtaatctcacaggatggggtgatgaactggcagcatcttattattttacagccagaggcggatcaaatgtctatgatttcagttatcgcattccagtaaataccatgaatgggactgtgcaactgagaacagctattaataataatcaagttatccaagaaccttttaaaaatgccaatattcgcggtgagtcccaactctatgaaatcagttttcgtcaacctttagtgcgatcgctccgccaagaatttgcattatcattaggttttaccgtccaagatggtcaaacctttacttttgcaggtccgacagcattcggttttggaccagatgaaaacgctaacagcagaacacgagtaattaaatttggacaagactatttatcaagggatttacaaggtgcatggtctttacgttctttatttagtctgggtatagacgtatttgatgctaccagaaatgccgatcctattcctgatggtcagtttttcagttggttaggacaaatacaaagaatacaaagaatcagcgataactatttattatttgcccaagcagaagtacaattaacacctaacagtttattaccatcacagcaatttataattggtggtggtcagtcagtacgtggttatcggcaaaatacccgtgcaggtgacaacggagtaagatttgctgtagaaaatcaaatcacactatctaaagatgaaaaaggcaactcatcaatcaaaatagcgccattttttgatttaggatatgtctggaataaagatgataaccctaacaccctacagagacaaacatttttagctggtacgggagtgggagttttatggcaacttgtaccaggtttcaatatacgcttagattacagtctacctttaattaatttagatgaccgtggtgtaaatgcccaggatgacgggttttatttcagtgtaggatataagctatgaaatcagaaaactcgtttaaagtgaaaatggaatcacaataatggtgaaaaatttttgtatatgacatcatttgcttccttttatccagaatacacctgttcatacaataatcctttaaattgcgatcgccctttacaaaccgcccaagaactcaaaggtgctaaattctgtctagaatgtggttttcctgcgactttatcagagcaagcagaaataaaaggtaactctggtacatatcaggtaactaattatttaggcgtgcgaggttatggtcgggtatactcaggtattaaaatcaaagaccaacagccagtagaaatcaaagaatatatactgcccaaacgttgttttaatgaccaagaatcaggcgatcgtaaacaactttttcaacgtttaggaggaataaagttagcagatagtagaatgcaaaattttcgcttagttaacacattagaagctattgctgatgaaaaattagaacgttgttatttaatcacccaagccatagaagcatcccaaaccttacatcaatatctcatccaaaacgggaaaatgacagccgttcaggtgagagaaatactgaatcaaaccctacaaactctagaatttctccacagccaaaaaatactttttccctccaatcaagtacaacaaggtattgctcacagcaacataaatttagatagtatattaattaaattaaccaataaattaaccaaacatgaacaattttctatatatctttgtgatttagcaatttgggaaaacttatttattcccccagccattacccaacccgcacctgctcaaaaagaaaaagatttagaatcattaggattagtagctttttatttactagcaggaagcacgataaattatgctgatcatcaacctctagaccccagagacaatcaacattggtctactacagatatttatttaaagcagtttattgaaaaattaattggcatacatacaccttttacaagtgcagaattagcgcggcaagcactcataaaattacccaaagaaggtcaaacaaataattcagattcatcttctcaaacacaacctgatcaaagtcttaaaaaagtatcaatgtggttattaatcatagttttgttattattgggaggaggaatttttgcttatgttaagtattttaatcaacatgatgatagtagcaaatatttacaatggtctaaactgcggcggagatttgccgatgtaaataatgtacctgctgggcaatttaattacacaggggaaaatcctggaacatggacttttattatcaaacaaaaagtaggaaaagacagtttagaagatttactatatcaaccgaaaccagaagcacaagcgacttttaaatatactcccgtagcgtcatcaaatttagaaaatctggggcaaccgatagcagtagtccaagcaggagaaaaagactttgccatcaccagtttaactcagaaaatatcaggggaactagataaaaaatcagttgcttatgatgggttattagtctatgtggaatttagtagaaaaaatgacaatatgacagatgcactcggtggtcaaattacaatcgatcaactgcgtgaaatttatacaggaagaattacaaattggcagcaaattaatagtaagctgccgaatttagaaattagaccatttgcccccacagaaccagaagccaacagtaaatttatagaaatagtgctaaaaaatgaccctcaggatcaagctttatttgcagccaaagtgactcagtgggatacaaccagaacccaaaaccaaattcgtcaagaaattctcaacggacaaactactggtatcattggttttgggatgattagtaaaattaagggacagtgtacaggttatccattagctatagtagatggtaaaaaaccagctattcaaccgctatttcaacaacgcgaacgccgtcctctgaaaacttcagacaacctctgccagcatgatgactatttttttgatgttaatgctttccaaagttaccctttaggataccctatatttgtagtttaccccaaagacaacagccgccctgtcgctggttctacctttgctgagatactaactactcgtcagggtcagtgtttacttagtaaagtaggtcttgtccctttacaacccatacctgatgatctaaacaattatggctgcaaatcgttgtcctaacccaagctgtgaatattttaacaaaatcctacccaataatgccaaggtttgcgcttggtgtggaactcctttgggtaatctagtagcacctacacctcagataccaacaccacctcaacccacaccgataccgacacccataccacctcaacccacaccacgaccaacaccacctgaacctatcaagcaaccaccagttgaggatcaaaccaattatcagccacgttcacccgtacaacctatacagccagcttatcccccaccgacaccgaaagtaccacttctcaaactcattcacttttcaggtagagaatttcaatggtcaggggaagcaggttttattggtcgccgcagtcaaagcattactattcccccagaaattgacctaactggtatccccaacgaaggaatagtttctcgtcgtcatgcgcgagtgtcttgggattggtcgcaaaatagctacatgattgttgacatgagtaccaatggtatttatttaaacggaactcctttaagtcctggtgtccaatatcgcctcatgaatggggattcattgcagtttggtcaagaaaatctagtacgttttgcggttcatgtaggttaattaaatacctagcgtctggatggggtatctgggcatgatgttcaatgatactttgatcatcctaatctggtgcgggctggacagcccgctagacttaatataaattaaacatacaaaagcttagtatcccacttaggggttgctgagaaagtttggtgaagatatagacggcaaactattgttacttgtaaattgcagatggatgcaaaccttataatttgcccatttcgccgaatttatgaaaaaaaggagcaaaagccactcaaaaagcaggagtattaaaataaaaattacgcattataattgatatagtaataacagaaatggagatgccacaaacagcaacaaataagttatcaaaattactctattaaacggaagtagatatgtatcctaaaaaacttagatttttgacaggttgtttgcttacggctttagtctatttaccgccagattttctcaatccgacgaaagttttagcagcagatcaggttgtggtaaaagcacaaaaatcaggccaatatacacaatatatgtcccgtggttatgaattaaccagacgaagaaactatcgccaggctttatcttatttccaacaagcactgcaaatacgtcctggcgatcgctatgccacaacagcaattagaaatgtaactggctacattcaacgtcgccaaaagattgtctttgttccgggtagacctgatagaacaagaagtgcagccagcagaagcacagggcgttttaattcccttgctctaacagccacaaacctagaagcacaactaacgacatcagaacatcccacattgtggttttacattgataaagatgctcgaacagcaaaagaactgaaatttgttttgagagagggtaatggtcaaaggactaaacccctatatgagagaactttgacacctgtgagacaagaaggtattgtgagtgtaactgtacccgtggataaagcatcattaacaataggtaaaaaatatacttggacttttgacatagtttaccttgatggtccgaatcgaaaactaaaaggtgaaattaatcgcgtgccaaacgaagacatcggtaaccagatccaacaagcaacccaaccgttagatcgggccgtgatttatgccactgctggaatttgggaaaatgctctgagtattgtggccgatttacgctgtcagcgccccaatgatacggacgtacaggaatactggaaagatttgttgcagtcggtgaacctagaagggttggcaacccaaccaatattatcttgtggtgcttcccaaaactaaaactgaggattctagtaaatgagatgcgtagggttacaaaataaaatcaaactatgtcaagaaaagtaaacaagcctaaaaccctttttcctcttacctgattcccagatcaatttttaacaccaatccactcacctctttaaccaaccatcaagatagaacctctgcaaaagtgaacagcaatcatcaagaccttaacctcaaagaaacactggatatcaaccgatatattcaacaggcttatacttgttttgcccaaggggatattgagggagcgatgggcaacttccagaatgcgatcgccctttatccccattgtgtccaagtttatacagaaagagccaatttccggctgcatcagttacaagatctaactggtgcattagaagattatacacaagctatttatatcaatcctcacaacgctctctgttatttttggcgcagtcagacttatctagcactaggtaatcaccaaaaagccatagaggatcataacacagctatgagtctagctccagaaggtactatttatcatttctttgaccaaagtaactacaagtcatagctgtaggattgagggtttgtaactgtaagataaaatctacccagatgtaaacacaattacgggaatgtacacataatactgtacagttatgtaaccagttgggtctagacttgggtagctctgggtaagttttatagagcgggaatcaagaagcaaggtagcaaggagaaaattgctttttacctgggtttgcgttacatccccaatctcctataaagttgccacaatattcaacaattcctcaactgactgatatctttgtgtaaagtcaagatgcaccattttattaatcaccccattcaatggctcagtggtgtttgccagttcccaccaataataccaaatctgttcacccgtttccgatgtctgattaatgatcaccacaccagtcttgacatctcgctggaaaactttgggatggactcctgttaaagcttgtatgatcattattcccaaagcataaatatcgctgttgagttttggcataccgctcatttgttcaccaggtgcataaccaagagtcccaatagcgatagtttgattttcttgctgttgggcttgcacttgtggttgtatttgtttgacagcaccaaagtcaatgagaacaatatgatcatttgttttgcgtctaatcaagttactgggtttgatatctcgatgaatcacaccataactgtgaacaaatactaggacttgcaatacttctttgagtatattcatcgcttcggcctttacaagagatactcctggtttcaacttatcagataaggaatgaccatcaataaattcctgaactaaataaaattgctgattttcttcaaagaacgccaataagtatggtatttgcgggtgtttacccaaagtttccataatatatgcttcattatgaaataagcgtctgagaacactgagatattgtgagttctggtgagcagaccgcatttgtttcacaacacacactggttttcccggtcgttgaatatcttgagctaagtaagtagtaccgaatcctccactacctaacttttcagtaatgttgtaacgtttgttgagtaatgtatttaacgccagttcttgtcctgaaggatagagtgcaggactcatatttgttgcctgagtttgtctactgggttcttgcaatttataggcttgcaactgagcaattaagtcttgttgctcttgtactatttgcatgactttctcctgctcttgctggctaaaataggcactgtaagcaagaacaccaaccgctgcaactactaagcccagtgctggagaaactactggaaaccatccagcttggagaaaaatcacaaaattagttcccaataaaacggctaaagatccaccttcagccactcccaaagctaaaggatgtcgaatacgccatgctaaaaatccccctactacagaccatcctcctatccagatgaattcaccccatcccggtaaaaaccaaaacagacgctggttatttaaaactgcactgagaatttgactgaccatctgagcatgaatttcaactcctgccatcttccctgtattattagctttgccagtagtaaatggcgtgttaaaaatgtcttttaaactcggtgcagtcgaaccaatcaagataatacggtctttgactaaatcaggtttcacctgaccagaaagtacatctgtaacagttacctgctgggcgatctgactgtgagaacggtaattcaagagaatttgatagccttgggtatctgcgttttgataacctccagaatgactttgcagaggtttaaaaatcacattacgcagttgtagttcttggttgtccgttatttgtgcctgaatacctcccccatccaagaatttaatggctaattgccaactcaaggagaaagggctttgacaaagatttgactcatttgccttcactgatatcagattgcgacgaatagaaccatcaatatcttcgacaatatcactaaatcctacttgttctggttttgttccttgtgggggtgcgatcccaggatttttgctatcagcgtgtttacagacaggaaagatgatatcactgtactctaaacgttctagtaatttttcatgtcctggttgcacaggtaagtcccgaaaaatatctaaaccaatggcacggggttcatattcttccagtttgcccaatagtttgtctaggacttccccaggtaaaggccaattccatttttgcagatcctcctcagtgacagcaacaattaatagccgcgaatctgggacaggatcacccctcatttgcatcatctggtcataaactcttaactctatgttctctaagacttgtagtttctgaactcccacaatgaaaattgtggcgatcgcactggaaataattactggttgttttaataatttcttaaaatttgccaacatttcactcaacatttcactaatccagatatttcataacatttaattattttttagaatcaataatgcaatttatgtgataaaatttacaatttttattctttagttaattgacaattgtatatttttatatatttgtggcaaaaacagaggttaaaagcagataatacgattatatactatttcaatttccgtagaacctattctgcatatactggcaatattaattacagtagtaaaaaactatgatagtgacacttaatgaattgtcactataagggttgcagattatgcaaatttaatcaccaccagatatccatttttgtttaactctggaattatcaactcaatatcgtgtcacctcctgaaaacaggacactcaatcagtgccaaagtaaaatttaccagaagcttatgctgatttactttttgcaattttttatttatcaaagtcgagtagagctatgattcggggaattatttgcacaaaaccagaaattagctgtcatgatttgagatcatcacatatccaagaattttgtcaattacaatctgaacagttaaccaatcaatatccaattttattagctcgtattgtctattatgattgttggtcaaagaaacatcaagaaataattaattattctgatatcagtgaaaaaacagccaaattattgtcatttattttgacatacttacgctcagaggcatggttaatagactatcctgccgtcggagaaatccatgaatttaaaatagaagaattgcacttattttcctatgtatttcccataggatatagaaatcaaaaaccagaatatatacagataattacagaaaacacccttgtagaaaatgcaaaaaatgagataaataaatctgctattttactgagcaaatatgcagacctatatttagactatggcagacaaaaatcagaaattaaattgctagaacagctactgcatcgagtcggacaccaattgcgaaactatttaggattaataggattatatgccaacaatttatgctttagcttaaaagatcagcctgagtatgaacaagcaaaaatcatccgtgaaagtattgaagatatagatattaatctcaccgaaataattaattgcggtcaaggggagaaattaagagtcactccacaagacctaagaaatttagtattggaaactatcaaacatttacaacctttgatcaatgaaaaacaagtaaaaatatcaattcctgaaacttccacaaccttgttaatagacaaattacaaattaagcaagtttttcacaatatactaaacaatgctatttactttagtcccaaatcaggaacaattacctgtagctggaatatttttcaagaagaagtattaatcaaaatttccgatcagggaaagggactatcttcagaagatatacaaaaaatctttacccccttttatactcgtcgtccaggaggtacaggactaggtttaaccatcgccaaaaaaattattctcgaccaccacggaaacttgtgggcgcaaagtttatcagaaagtggagcgcaattttgtatcattttaccttgcaccaagaatatttaacagtatgaacaatggagtatgaaaaatggcttatcgtaattctctgacaactatcttggtagaagacaacgaacgctttcgccaaggtctacggactctcttgagtttttataatagcaatggttcattgcctgtagaagtagtcggtgaagctaactctttagaccaggcgttaaaattgacagaagataaatcaccagatttaatattactagatttgcaacttattggtagtgatggtattaccgttttagtttctcttaaacaaattgcttatcctggaaaagtcctagttttatctgctcaccaagaagacgaatggatttttcgagctatgcaagcaggagcatctggttatgtgtttaaaaatcatttggcggctcaattatcagaagccataaacacagtaactaagtcagaaatttatctaccttcagaagttgccagtcgatttttcagattttttcagacttattcagactcctgtatgcgtgcttgtcatcagatgcacttaacaacaagagagcaagaagttttatattggttaactcaaggagcttccaatgaagaaatagccaaacatttatatgtcacagttgctaccattaaggctcatctgaccagtatttttgaaaaattgaaagtcaatagccgtactcaagcgatagttagagccttaaaattaggacttgtaacagtttaaagtagcaaaataatgaatatgatcatcctggaaattgcgattctccctctaattggcctcctgccttctttaataatatggaaagtaattttttaataaatgccagcctttctactcaaaatctgacctttacaccaggtactactcctgcttcttttacagtgacagtcaacaacgacagcactcaatttgcaaattttcaaatagaaattacagccgcaggagagcagcgcaattcagaatatcgctggtataaacttgaaccagaagtagcagcagctaaaccaccaggagatagtacagactttcaagtattcatttttaatacaccaatacctggatttgtaggtactgtcaacctcaccatcaccattttttcaccacaactaggacaacaacgcagactaacgttgcggttaaaaatcgagcgagataatcaacccaacgtcttgagtttagaattgcctgtaagagaatttccagtttatccacgtaattctgtagatataccagtgcgagtgcggaatttaggtcaacaaatgacaaatgtaatcttgcgttttgttggtcttgatccaacttggttaattggtaatgtagaaagacggttttctttagatccaggaggctatagagaactaacttttcaatgtcaacctccatctgtagttcaagcaccctgtcgaacctatccgtttaccattgaagccaccagtaataatggttatcccgcgagtatagcaggtaatttacaagttttacctgtaggtttcgtagatttttctatcactaaccaaaaccaaacaattcccagtccagctaaatggttgcctgattggaaatcagatacagccacctttgaattaatattcaaaaatgccagtaacctctaccaagaaattaacattcatctccagggaagagaccaaagaaaatgcacttacaacactattccagaaacagccaatttgcagctaggagaaacaaataaagttctcctcaatgtgaaaacaaaacgtccgtggttgggattagcaaaaaccttgttactagaagccagaagcgaattatttgatcaacgtttgggtactacagatcccgcaacccagactttagaattacagagtctacctataattcccccgtggttacagctaatgatcctgggattaatagcattacttttagcattactactgaaaccagaaccagttatgcacattcgttctgtaaattcagtagcttttagcggtaacggtttttctgttattagtggttcagatgattgtacattaagattttggaatattaatcgcaataacaacagtatagaaccaggaaaatttagctatcaagaacagccaatagcttgtcaaaaaccacaaaaacctaacggactgttagccattaccaatgacgttgtatatgtttccgacttcatgcccgtggacaatgatattgttgccgttgggttagataatggtatgattgaactcaggaatgtatctaatcaaggtaaaaaaagggaagaactgcaagatcaacaagatcaaaaagctataggtgatagagtatttgatttagaatttactaaaaattcacggtatttatttagtagttatggtagtggtaaaatcagattatggtcacgaacatctgctaacagtgaatttcagaaacaaccgcaaatcatcgacatccaaaatcaattaacattaccttttgaagctcgcactgtaactctcagtccagatgaccaaaccctagtaataggaggaaactttaagcgttttttatttggttcatttaatcccaatcaaccagataatcaactgcaaaatttatcaatgcaaaaattagaaagcagagatagtaggggacgtacagattatatttgggcagtggattttgtgcctaaaccgcaaggaaaagagcaaattttagcaaccgctgattctgggggatatattactatttggaacttaaataaatgcccaactataataaatgccagcccccaaaatcccattaccgaagttaattgtcaacaattagatagttggcaagtgtcacaaatgccagtgcggacattaaaatttagtgaagatggccgtttgcttgtcagtggtggcgatgatggaaaagtgatagtttggtatttaactccagcatatcaactggataaaaccaaagcagcaaaaggtcaaacaatttaccaaagctcaaagagaatcaatagtgttgacttgaaagacaatatgattgtgagtggtggtgaagattttcaagtcaaactacacagtgttaggtaaggaatttgatggtatgtacgctcaaaacagtccattggaaattattattaaccctcctggaattcaatggggaatgccaggagatgcgatggaattttatgttattgtcattaatcagggagatcaaagtgctgttgttgacttgtattttacttttaatgatgaatttaaaaatattactagtggctttactcctcctcaagccagtttgggattagcgccccaacaaactagcgacgaagttaaatttgagttgcaaatacctgttgacgctaaacccggaacttatgattatactttagtcgtagattctcccttgcattatccccaacatactcctatcaactttcccctgcaactgaaagttcaaatcaaagaacaaacgatcattcgccttaatgatcccactttttcactcaagcctagcagcaatgccaataaaccactaattttaaatctcagtcaacctttacaagtagaagtaatagttgacaatcgctctaaatttgtagaccgttttcgcatcacttgtccagatttagatgaagattggttcactattacttatcccacagatgggttagaaggagcgggattatcacaagtagctgctctagaactcaaccctggtagtcagggtcaaatcttgctgacatttcacccaccaggagacaccttagccggaatttattccccgactattcggttatattcggaaaactctccccagttgatactgttagatttggtctatatagacattaagccaagttatattttggatgtccagttgcaaactattttggcacaggtcagccgtagtcctgccaaatacgaattatcaatcattaaccagggaaatgtagtacgcgaattaatgttttacctggaaagtcgagatgaagaacaattgtatacctataaatttgatcctagtgaaatcaaattgctgcctagtaaaagttctatatctaatctgacagttaaacctagatattggtggcgaagaccttggtggggtggggggttagttgtcaactttcaagctaaaattcaagaccaaaataatctgcctttaccgaatactttacctcaattaagttttatttggaaaccccgtccttggtggcaatttttattattaattttaataggtttaggtttattcggtggtataggatttatggtttggcggcttttaaaccctgaacctgtaacaattaaagaatttgcaactgatagccctacatatattgaaggtgaagcagtagctttgaattgggagattcaaaaatatcagaaattgcaaaaattggtgctgacaattaaaggaaatcaaccaactcaaaagacttatgatttcagtaatggcattcccgaagaactaatacctcgtgattctggtataacacctccttgtagagtgtcaaaagaagaattgatttgtagcaattttcaaacaggagtcaaagctaaaggacagtatagttttgaattacaagcatcctatcgcaaaggattgccaattttctccaaagttgctaaaacagatactaaaatagttcaggttgaaattaaagaaaaaccaatagctgaagttatagatttgaaaacagataaaccccagtataaaaaaggtgagaatattaatttaagttggaaaattgctaatcccttgctgctaagggaaattcaaataactggaaaggcagaaggtggtacatctataggtaaattaggtgtttatcgttttagacaaggtaaacttgtcgatccgcctcaactgcaaaatttatgtaaaccaatagaaaatcaacgattagaatgtaataatatacctatagacaaattaaattctggtaaattcacttttgaaattcaagctttacccaataacggcagtgatagaagtagttctaaaaagactgaatcagtaattgaagtattaccaaaaccatttagaattatctcttttacacttaatggtagtgaacaacctaatcaggagttaaaagaaggagaaacagctactttatattggagagtagagggagaagatattcaggtgaaacttgatcctattattgggaatgtagaaccatctggatcacgacaattacaagttaatcaagcctttccatctcaaattagactgcaagtttatgataaattgggtaagcagcaacctcaagaaaaatcttttgcgatcgcagttatccaacc

SEQ ID NO: 53 - DNA, 37432 bp, Sphaerospermopsis sp. LEGE 00249
  LEGE00249_68
gtccccagtccccagtccccagtccccagactacttagcttgaataggagttaaagctacacctttgtaataatgtcctaaaatttgcaggtggtttgctccctgtttagctaggttgtatgctccccattgactcatacctaaaccatgtccaaaacctaatccttggagggtgaagttaccatttgcgtctttgttgagggtgaaacgggtacttctcagttttagtgcggtgcggactgcttcacctttgaggacttttgtaccttgatctcccacaattcttaaagttttaacgctgcggaaaggagacagagattcaatcatcatatctctgacgttaccgactccagaaatgcgagagctaatttcttctggggtgaaggttctgctccagttgcattctttgatgttttgatcgaagtcttggacagcgcgtaaataaggaagggggtttccccaaacgtcttctacgttttcggtgtgtccaccagaacaggcatgaaatactgaaagaataatgcggttgtcgtaggtgaggacttgacctgctgtactatctactgctgcgtaggtgttgcgagattcgctgctgacacctttgtaaatttgccagcggtcgggggtatctcctaagtcaaaaatggggttgttgcgttgttgttctcgtttgtaaagggcataggtacgggcagcgatcgcttgggcttttaaagcttcttgcggccagctagagttcatttctccaccgatgacgctgtagagatattcttctaagtctacccagttaacagcggttaagccgttttcggtggggataaccaaagttctaccgcgaaaccagcgatcgcctatataaacaaatcctttatctgtaggttcaatccaaaataaaccagattgccatttatctaagcctactcctccgggaactgcttgggctgcataagcactcattcctggtagttgtcccagggtacggccagaactatctttaactattgctgtcgtggaagcaccaactttaacttgatttactcccttttcaatggctacgcgcaggattacagatgcttgagcaggagcaactaaaataaaccataacaggattcctatccaccaatgttttccttgaatttgggaaaataaagcgcctaaataaagttggattttcatgctgaccgttgaatcacaagcctctaccagtttaaaagatatttttccttgtgagaaagttgcgacttcaacttgaggagatcaaggagtcgtaggggcgaagcattcggaaaataacctgtgataaaaattgataatttatcccccgaatgcttcgcccttacaggagatcaaggagtcaggagatcaaggagtcaggagtcagggagaaattatttgtattttcccagtcaccagtcaccagtcaccagtcaccagtcacctgaattattgacttcattggcaacaataccaattaaatttaactgactcaaaatttctgttgtttgcattagttgatgtggtgttaattgcccgatgcgtccgacgatgacaataccattagaaacagaggcgataattctcgcatcaacactatctaaaatagaagaagtatctattaaaactagatcatagattttttcaaaagactctattaattctttaaatctttctgaactgaggagattcactacattatctggttttggtcctgcggttaaaacatcaattgatgggtgaataggttgaatataattttgaaattgtgtcttgatgtcatccagcaataataaagataaaccccaatcattagagattcccaaaattttgtgtaagctgggcgatcgcaaattagcatcaatgactaatacccgttggtgcatattcgctgcactcgctcccaaccctaaagttaaggttgttttcccttctcctggtagtgcagaagtcaacatcaaggatttaaaaggtaaggaatttttcaagatttgcagattttggtaaatcatatccagggtttcatggctggataatttacttttgttttctgtatttatgttttctgtatttatgttttctgtaattaccgatgcttgtttttcttgcttctgtctcaatatttctttcaatctgctttttaaactaggtttacccaatcttggcacagaaccaagtaatctgatatttgttagtttttgtaaatgtaaaggtgaaaaaattaccttgttaaacatttcccaaattaaggctacaatcacacctaaaattggtccagttacgattccaccaataatcaataaccattttttcgtaccaatataaatacctactgctggttcttccaaaatttcccactcaaatccgctttgagcaattttcaatcctaatgattgttggaattgtaccatttgttcaagtgtttggcgttggattttgacatctgatagcaaacgattatattctgatataaggctgggatatgtatttaactgtgtgcgaatttcttgttcagatttaactaagttattttctttattaatgagtgaatttcgttgtttactcaacccggctaactcctcaaataatttgttatcaacagttaataaattttctgtattttgatcagtattagtagctgtattttgcaattgttcttgtaataatgccatctgaagttggcgtttttccttcagtctgatcaccactggagaattatcggtgtagcgcaaacgctcctgagctaaattagtttctgtttttctaagttcattgactaaagcttcatagttactggaacgatttaaactagcagttaactgtgcattcttttgggaagatgctaatttttgttctagatttttgtagcgattttctacagtttcgagttgtaaacggttattttgtcgttgtttctgaatatcagccagagattctaacaatattttactttgtatttgtggatcaattacattatgtttccggcgaaaaaatgctaatcttttttcagccgctaatgtctcgttctgtaaccttggtaatcggttattaacaaaggctaaaccttgatcaacacgctgatttttttgttcaatattatagtcttcataaactttttgcagagcttgtaatactctttggcttttgacaggatcggggtctttaaatgaaacgataaatacttgattattaaccccattagatgataatttttcttctgcgggtttgatttgcaaatatccagttttgccagtatcactgttacctttgatatcttctaaggtaatattgggataatcagcacgtagtaaatcaactgctttttgtactagcttagaactcagcattaatttcatctgctgggtatattctccagatgaattatcagaattatttaactgactggttgcatctatttggctctgtgtttggctctgtatttggctctgagttgatcgtaattcttgatccaaatcatcagttatcatgatttgcatagaactctggtacatcggttttgtgatgacagccaaaagacttgtaactgatattactgcacaggaaacccccaaaattaaaaagcgtctgtaaaacaaaattgtagctatttgtctaagatcaaatacgctttgtttagaggtagtaattacttgtttacgattgagatgacttgtagccactagaaaattcctctactatgaaaataatatatctggaagataatgatgagagcaaattttgagatcaaactttgagatatttttccttggagataattgatactcaaagttatttcttacatcaataagagttattctttccatgttgatgaagtggagcatcccaaatgtgtaaatttatttttatctagggaaataaaatgctccaagtcttgatataattgaactgcaaaggacgcaaaggacacaaaggtaagaaattgtgagagattttttagtgttgctgcgtttattttgtcaaaattgggatgctcccgatgaactacttgacagaacatatcctacatagctcttagataataaattcatcccgatatatgtccagtcagcactatgatagtaaatttattcataagaattttaaatatttaatgaaggataaataggaaatatattaagtatgaaaaatattcaggacgataagtgatctaactttaaaaaaacattaaataaacctaagaggatgtttgaaaagtagtatattgtgattctaatcacattgctaccccctcctcccttgtaaaagggggaaacaataaaaatccagttccctccccttgacaaggggagggttagggaggggtcaaaatatttgatacaccatgaaagacttttcaaacaacctctaaccaacccctaaccccaacctattacctacccctcccttacttttcagactgacagatccgacttttccgactgagagatccgacttttccgactccagaggtaacactagatagctattatcagcatataagaagtagtacctcatagaaaaaactatgcttatagctgtatcaatgattattatttctattaaaaaactagaaaattaaagattttttcaaagatttgttccctgttccccgttacctgttgtttttacccaatagtaatttagcataacaagtaccgaataatcatgtttaatcgtatatctgaaactctaatacacaagatccgctgggtattaactatcctatggctaggattaattgcatcttttgtatatgatcctttatcttcaatattgactaaacctgaaaatacttggagtcctttgagattgtccaatacttgtattcaagtacaagataaatgcctctcacaacagccttatcctctgggaacaaccttattttggggagcaattattcctatttctattttcattttactagtgttcggacatgaaatgtggcgaagaatttgccccctatcttttttatcacaaattccccgctctttaggttggcagcgtcaaatcaaacgagaagatcctaaaactggcaaaatacgttatgagttagtaaaaattaagcctgattcatggttaggaaaaaattattcctatgtacaatttgcatggctgtttgtagggttatgtggtcgtattttattttttaatgcagatcgtttaatgttaacattatggatattatttaccattgcattcgctattactgtgggttatttatatagtggtaagtcttggtgtaactacttttgtcccatggctacagtgcaaaggatttatagtgaacctgctggattatttagcagtcaggctcatacaagcgaggaattaattactcaatcaatgtgccgtactacattaccagatggtaaagaaaaaagtgcttgtgtagcttgtcaaaatccttgtattgatattgattctgaaaaaacttattgggctgatttaaaacttccagaatcatcgtttttacgctacggctatgttggtttagttattggttattttgtttattactatctgtatgctggtaattgggattattacttttctggtatttgggcaagagaaaccgatcaacttgcatcactgtttgcaccgggattttatctgttaggaacaacagttaatatacctaaaatagttgcagtgccgatgactcttggaggatttacagccctgggctacgggtggggaaaagtaatagaaaagaaagcaaaagcttatagtctgcgtcatcatcttcatctttctattgatactatcagacatcgaatttttaccatttgcacctttggcattttcaacttcttttttatttttgctggtcttcctctcattatattattgccattatggatacaatatttatacgatatattattagttattttgagtacaatgtggctatacaaaacttggaaacgtaccccggatatttactccagagaaagtgttgcgaatcgtttacgcaagcaactagaaaaactagatatcaatttgcccaaatatttagatggacgttctattaaggaattaaatactcatgaaatatatgtattagccaaggtattaccaagtttcacaaaaaacaaactctatcatgcatacaaaggtgtggcacgggaatttttagtagaaggaaagatgaaatactctgaaggtttagaagtattacaaaaaatggctcaagagttggaaatttcagaggatgaacactgggaaattctcaatcagttgggtgtggaaaacgtagaaattatcaattctcctctggaaataaaaaatgtagaaaatgatgagctattgcaaaaactgcaagatttgactcagggattgcaaaaacatttcgataaaatcctttatgtaccaaccaagtatactggttttgtactagtaaaagatagtttgcagaaattaaggcgatcccaggaaaaagaaaaatgagaaatatgaaatataaagtttttatttagatcccggactttttaaagaagtcgggatctatgcaataaccccgactgacccatgactagtgctatagtatataaagaaatgtaaagagattatcaatactgtcatgcaggataaagttattgtcgtcgttggtgctactggtggtattggttcagccttagttcgtcaacttgcacccactggggctaagttggtactagctgctagaaatgccttgaatttagcaacattagctagtgagttatcaggggaagtgctgacagtgccgacagatattacacaaccggaacaagtggaagcattgatacaagcaactgtggcgcagttcggtaaaattgatgttttggtaaatgcggctggtttaggtattctcaaggcatacaacaatatagaatcaggggaattagataaaattctggacttaaatttaaaaggttgtttttatacctctcaagctgctgctaaggaaatgcaaaaacgcaaatctggccatatttgtaatatagtcgggattttaggtaaacattccatgccgatggctgcggcttattctgcttctaagtttggggttgtgggttttagtaagtgtatggcggaagaacttaaacgttttggtgtcaagtttactttgttttattttggtggtgtagattctcctttctgggacaatgtaagtttaaaagtagatagaagtaaaatgttaagttgtgaaacggcggctaatgctgttttctatgctttatcggctgaacctcaagctgtgccaatggaaattaatattcagcctgatagtcatttatttttctaagagcttttttcaggtaaatgaatcatacttaaagacaagttccgcgcaaaggtgcagaggtgcaaagtcgtaaagagaaacttagttttattgctggtgtgtttcatttacttgatcactgttaactgataattgataactgatatgctgcaaattgatcacgttcacttctatgtagaagatgcccacacttggcgcgattggtttgtcaaatatctgggttttcaaagagtagttaattcatttttttcaagttatgaaaatcagggaagttcattacacactctgactgaagttgtgaaaaatggtgatgtctattttttactttcttcacctcttttaccctgtagccctgtagcggaatatttacgttttcatcctcctggtgtggttgatgtggcttttgtggtggaagatttaaaggcagttacggcaaaggctactgctaatggtgctacacttgtacaacctgttgaaaatggtgtattttttaaatatgcaaaaatttccggttggggtaaattaagtcattcattaattgaaagaaatattgagaaaacaattattgaacaggatggttttataggtatagatcatgtagttttaaatgtggaagtcggggatttacaaactgctgttaaatggtatcagaatattcttgattttcaaccccaacaaagttttaatattcaaactgatttttctggtttgcatagtcaggtgatgatttctgctaatggtaaggtacaattaccaattaatgaacctgcttctgctaattcccaaatccaggaatttttagaatttaatcgtggttctggtgtgcaacatattgctttacatactcgaaatttaattgatgcgatcgctcgttttcgtgctgctggtttatcttttctctctgttcccaaaagctattatttacaattacaacaacgtttagaattgcctttatcacctgaagaattacaggcgatcgcccaacaagaaattttggtagactctcaacaagatgcacctttagaagcgttactgttacagattttcacccaaccaatttttaaagtacccacttttttcttggaatttattgaacgtcgttctcaagctgctggttttggtgaaggtaattttcgcgctttatttactgctatggaaagcgaacaaattaaacgggggtttgtaaaaggtgacaggtgattggtgattggtgactggtgactggtgactggtgactggtgactggtgactggtgactggtgactggtgactggtgactggtgactgggtaatcaattttatgtttccctatcaactatcaactgtcaactatcaactgtcaactgtcaactatcaactatcaactatcaactatcaactatcaactatcaactatcaactatcaactatcaccaattcctgagataatgatgaaaaaattaccatgaacaaaactgatgctgagactgattacagattttgatggtccaatcatggacgtttccgaaaggtactatcaagtttatcaactttgtctggaaaaaaccaaatatcctgatcaacaggtaagagaactttctaaagcggaattttggcaactcaagcgatcgcacattcctgaaaaagaagttgctttaaaatcgggtttaaatgcagaacaagcggaggaatttgcaaaaattcgtaagcaaactgtacacactcaaccctattttcaatatgatgttctcgttcctggtgcgttagatgctttaaccaaagtgcaacaagcaggagttgatttagttgtcatgactatgcgccgagtgcgagaattagattatgcttttgataagtataatttagggcaattcttcccagaaaatagacgttattgtttaagtaacgattatgtaaaaacccgtgatattgaagataaaccactgttaatggccaaagctattaaagaacttccccccgtttctaaaacttggatggtgggagacacagaagcagatattacagcagctaaaaaacacggtgtgaagatgataggtgtagaaagtggaatccgcgatcgcactcaattacaatcttatcaacctgatttaattgttgccaatttacaagctgctgtagattttattttctcagaaatgaagcttggaaattagtttttaattagtttttaattagtttttaattcacaaagcgatagctacccaaaaggtggcgatcgccatcaatttaagactcaatttaagactcaacttacaactcaattttaaggtaggaaatctgcatttagaacgtccaataaagagaaaggtgaatcttcaggaaatagttctgaaggtagttcatatttcctcaaagtatcatttctcgcatcttgataacattctaaaaatacatcatttaatatagatttcaaactaggactatctgccaaactataagctatttgtcttctttgttccacaacagtattacgccaaaatctagcattataatctttttcttctgtccaatattgcagttttaataaatgttctattaggactattaggcgagtttttaattctttcttttctctccttcccatactatcaatttcttcaatcaaattctcaatatctaatcgttctagctttccttcacttaacaatttgactgtagtttgtatccacaagtaaaaatcttgttcatataattttttcgtggtctcagtcagcatataaatttctcctgactttatctgatattaattacattatacaatatacaataaattcttaaataaacataagtaaattttcaataatttatcgctctctcacatcttccaaatcaggcataggaaagagcaaaattatctaagtcaaaaatttattcaaaaatctattcaaaaatcccagataatgaataaatcaatcaattaaatttttatagacttccagttttatagacttccagaaataacccaattttaaagcattactgcgccagataatagcaattaaattagtcaacaaacaagtaattgctaaacctagtaaaataaaagttggtaacatcaccacaccaatcataaaccaagtatagacgtggaatatcatcaccaaagcaaacatacttgcaaaaccagcagcttgccatatttgcaatttaggacggtttaagaatgtgaggataattgttaacaaagtagccaaaatatttgcaggtacgagaaatgcacatataccagcacagttggcacgggaaaattcagctaaagtgttgaaatcgagcattaatttgaacttatgatgatagggttagcttatgttgaaaattttgattaccagttaaattaccagtgaaacatttatttattaatttagtggtcttaatttaccttagcgcaatagtgagtaatcacctgaattattttacataatttaaagaattaaccaaaaaacaacctagtcatagatacttataaagtagggacaattcatgaattgtccctaccataattttcacccgatgtctattaaattaaacattctgactactttacgggcaaccacagggggtttgcccctactgactcctgaatatttaacccatcaaaattacagtatctaaaacgtgaatgataccattatcagcctcaatatctgctgctaaaaccgtggcatttttcacttcaaaaccatcttcacaattaattttaatgggtgaaccttccacagaagtcacagtacccagtttagctaaatccgctttagtgaactttcccggaacgacatgataagttaaaattctggttaactggggaatattctgtactaaagtggtaattgtaccaggtggtaacttagcaaaagcatcatcattaggtgcaaacacagtaaaaggacctggactttttaaagtttccaccaaactcgcagctttcacagcagctaccaaagtttgaaaaccatcattactaactgcaatatcaacaatatcagccattcatgtcacctcatatctgttgaaggttatacaaaatagtaaatcatgtttaagttttattacgttaaaatcctggtaaaataacaacttatgattgttgtaagattcctttatagataaaatgggtaatttaagttacgcaattgtaggaacaggtgcattaggcggtttttacggtggtaaactccaaaaagctggtaatgaagtccactttttagttaatagtgactatcaacaagttaagcaaaatggtttattgatccagtctaaagacggtgactttcgtttaccccaagtgcaagtttacaatcaagtcgagaaaatgcctagctgcgatgtggtaattgtgtcaataaaaaccactcaaaaccatatactaacaaagatattaccaccattagttaaagatgatagcatagttttagtattacaaaatggtttaagcatagaaacagaaattgcccaaattgtcagcaacgttaatattataggcggtttatgttttctgtgttctaacaaaattgccccaggacatatacatcatttagactatggaaaaattaccttgggtgaatatgcgactaattataatgctgtaggaattacagagagaatgaaagcaatttctcaagactttaaaaatgctggaattgaaatagaattaacagaagatttattattaggacgttggaaaaaattgatgtggaatattccctataatggtttatcggtcattttggatgccacaacagatgaactaatggcggatatgtacactcggacattagttgaacaattgatgaaggaagtacaattaggggcaaaaagtacagggcggataattcctgacagttttattcaaacaatgttagattatactgtgaaaatgaaaccctaccgcaccagcatgaaaattgattttgatgaaaatcgtcctttggaagtagaagcaatatttggcaacccattaagaatagcagcagaacatgatgtgagtttaccgttgattcgttgtttatatcaacaattgaaatttttggataatagaaatataggtgacaggtgacaggtgacaggtgacaggtgacagtaagaaggaaatatctcgttcccagtttctaactgggaatgtgttcaaagaggctctgtttatgttataacttagtttctctcctaaaaataataacttattcaaaataatctccaccagaaccaaacttccaagcatctacccaacgatgataataatattgttgatctgaaggcagatttttaattattggttctaagatagaactgagagaaaataaaagagtaaatataaataaattcccataatgtaatatccaatcaaataaacttaataaaccaacttgaggaataatcttagcaaccaagacaggatgagagaaacctgtttttaacaaagtttgagttaaagcagaaaactgtaccacatcttgtaaaaaaggctttaaaaccggatttcctaatttttccatttctgcaaatacagatgatagaagttggttaatttgttggggaggaatttgttgatttacacccacactcatagctttttgaaataaccaagttacactcaaactcggttgatatggttgcaggagttttaaagatttagatgataattgattggtttttaatgcttcctcaatgccaaaagttaaccgttgtaaatgacgaatcatagcaccaaaaccgccaaaactcaaaggtgattgatttccgctactatcacccactggtaaaatacgatcccaaagagtttgtaaaggactttcacggtaactgggaaagaaaccaaacaacgcccgtttaaaatttaattgactaatttccacaccttgatactctggtaaaaggcgaaaatattcctcaaataaatcttctaaactcaagcgttggggtgctgcatccatataggtaaataaataagttgttcttccatccttagcgggaaaagcttcccaaaaatattgacattgattttgtaaaggagtgaaagataacaacaaatcccctgaatcatttttcggaaaaccttctgcacaacttcccaccactaaacaaagtgcatctggtttttttccttgacgtgcttgtttactaataggtgaaagatgtcccattgcatcaagtaataatctcgctttaaattggttattgactattaccccatcgggatgaaccaccgcttcattaaaaggagtattttcaaataaaattcctcccaccgatagaaaccgattttttaaagttgcgagaagataaacaggatcaacaccaatatttaaaacatcttctacccaaacttctgtaccaccagaaaaactcactcttgcggggttgtattcagtgacaatagttgtttctaattctgcttctgttaataagtctaattctctaaatactgataattctttgcgagaaatattccattcctgttctcttccttgtaaaattcctctttctaataatgctacccgcacaccgcgcacagctaaagcgcaacctattaaaattcctaatgttccaccgcagataattacatcccagtctacagaatttaaaggtgtggagttttgtttaactacttctgtgaatgtttggttatcgcttcgcaaagatgttaaaatttggtcggtgcgccgtaaaccatttaatacatttccggggagttgagaaagaatttcttctgttaaagtcataatcattaattttgtttgatttaggattttcaggatttcaggattttcagaatgttattgaaaataatattatatattatatctattttttggataaatgaaccacgaagaagcgaaggacacgaagggaagatgttttgagagagattttttgtggttgcagaaaactgaaaatctcttttttcttctttgcgtctttgcttcttagcttctttgcgtaaaataaaatcttattttgtctgaatcaggatgtccaggatttgaggattttcaggatgttattgagagtttgattttttggatgtgaggatttttggatgttatctaaattatgatttagataaattaaaccctgaaatcctctcttttattagaaataatccatccttttccaagtcagttcttttgtcttttcttcccaatgccagcgtattaaattagcaggttgcttgggcgtaagtgtgggtaaattgatggcttttctgggtgcatctgtagctaagaaaatagctgtttctacatcacaaatgccccatttgactaagttctgcactcccgttaatagaggaaaagttgtaccggataatgtcccatctgctaatctagctgtgccgtttttaacggtaattttgcggtcatcccaaggatacacaccatctggtaatcctaacggtgctagggcatcactgacaagaaataatcctttacttgcacgtaacaaaatttctaacatgatggggactacgtgctgtccatcagcgataaaactactcatcacgtcgggattgttcattgctgcacctaataaacccggttcgcggtgatgtaatgggggcatggcattgaaagcatgagttaccattgttgcaccggctttaaatgcttgttgtgcttgtgctgctgtggcttgggaatgtcctaaactaacggtgatacccaaggaacgcaaataggggatcacttcccctgtgggatctaattctggtgctaaggtgataactttgacaattgaggcataatcacctaatacccgtttgacttcgttcattgtcaagggtaataaatattctgctggatgtgcgcctcgtttaccgtagtttaaaaatggtccttcgagatgaactcccagaatttttgcaccggacttttggctatagttggaaatgagggtgagcgatcgctgtatattttctacagaagttgttaccagtgttggtaaatatccatcaactcctgcatcccacaaatattgtgatatttcttctaaccgatggatgttttttcgcgtcaactcaggaaaagctaaacctagtcccccatttatttgtagatcaactccacctaatgatatccaatctccggcaacatccacaatctgtaaattttccggtgtctctcgttgacacactttccccattggtaaaatctcttcaattttaccctttttattcacccaaatcatctgtaaaccttgataaccgggtacttttgcattgataatatcaacgttggaaagaatcgggttgagtgtcgcggtagtcattaccctgccaagataaacctaaacttgattgtagatggaaatatccacaatttacccaaaatctaaaatccaaaatccaaaatctaaaatctaaaattctatgagtcttgaagttggtattattatgggcagtgattcggacttgcctactatgaaggatgcgatcgctgtttgtgaggaatttggcattgaatcagaagtagctattgtatctgcccatcgtaccccagaacgcatggtagaatatgcccaaaccgcccaccaacgcggtattaaggtgattatcgctggtgctggtggtgctgctcatctgcctggtatggtagcatctttaaccccactgcctgtaattggtgttcccgtcgctactcgtaatttacaaggtgtagattctttatattctattgtgcagatgccagcaggtattcctgttgctactgtagctattggtaacgctaaaaatgccggactcttagcagtacagatactcgctactcatcaaccagaattgttagcaaaagtccaagcatatcgtcaaagtttatgtgatatggtaatggataaacaaagtaaattagcagaattgggttatcagcagtatttagaacagaggttttaaaaaagaaaagttttatagcaggagtcaggagtaaaatcctagtcaagaatatgtaatagacatctccgaaaattaaatatgggtaacctgaaacccattcatagggaaaattcatgaattttccctacatcttgtttaatcacataacttatcttttgctctgtaatcagtatttttgcgtaattattactttgggactaaattgtatacttgattaaatttgaatttacatctcaggaaatttacttaaataaacagacattaatttaagattaatttaagattttttctgaacaattgtggtaaagacgtataaactactagatttagagttcgtatactatacaagtatattaagtaactggttaacagttttgttaatctagcgatcgccttcccaatagataaacactagccaaaaatgtaacttcgtacatagatcgacttctttggaagtggggtatctggaatacataatttttacatataaaaaattaataaattattaagaatttatataaataaatatattttaccttgagggtacagtgctaataggagaaaatgcttgtattacaaaggatctatcgacattaccttatcctgtgcagaagcatcatttatatcaaaaccttaaaaactgtaattgaatatacagaaacattaacaaggttaacattattaattgttgaattaatagggttgtgccagattcaaaactgcacattgaggagtgaacattcttcataaaaaataggaagttgttaataaaaacaaactcccaaatcgtttttgcataggggttagtatctcttatgctattcaaaaaaatatgttttagcaaaaaagagaaacatctcaaaactaaaacatcaaaaccacgatttttcacatttattagcgaaatcttgtgcaattaccctaattaatttaacttaaattatttgggtaagccaaagaaaatcattcaataatgggcaattatcaattgtcaattatcaattatcaattggtcaagcttttctagtaataaaaaccgcaatgaatcaacgaattcgtcccttacaccgcctactagcactagctataggctcaatggtctttgcaattttcgctcctacaattgtccaagctgctgatccgccaacattggaatctttagcggacacaaccacaaaattgcaaatttccattgataccacctgggtaatgctgacaggctttatagtcttcttcatgcaaaccggtttcgcaatgttagaagcaggtttattgcgacaaagaggagtagttaacgccttagtagaaaactttattgatccatgtattaccatcctcgtttggtggggtgttggttttgggatcgctttcggtacaagtgcgggcggttttatcggcacagatacctttttcctgagtcagttacccggtgctgatggtagttacccaatgggcgcacctggttctactgctgcacttaatacctataccttattcttcttccaatttgcctttgctgctaccgccagtaccatcaccactggttcaatggcgggaagagctaactttgttggtgacttaatttacagcgccatcatgggtgcatttagttaccccataattgtccattgggtatggaactcagaaggttggttagccaaaatgggtttccatgattttgctggtagtgctgtagttcacactgtgggtggttggacagctatagtgggtgcatatttaattggtccgcgtcctggtcgtcctgcttggggaacactcccaccagcacacaacttaggtttagcaaccttgggcggaatgattttatggtttggttggttcgggtttaaccccggttcaactttgggaactggaaatactggtttaattggtttggtaactatcaatacagccttagcttccggtgcaggtgctttaacagcaatatttttccaatatacccgttctcataaatgggatttaacctattgtctcaacggtgctttagctggtttggtgggcatcactgctggttgtgcgtttgttttaccttgggcagcagtattaattggaatcactggtggtattttaatcgttcttggcattgatttaattgaagcaatgcacattgatgatccagtaagtgcctttgcagttcatgggatcaatggcatgatgggtactatcgctgtgggctttttaggtcaaaaagaattgaccatgaatggaaaagcagggttgcttttaggcggtggttttgatttattgggtgtgcaaattttgggtatactggcgatcgctgtattcacttttgcttttgcctttgtgatgtttagtggactcaaagccattgataaattgcgtgttcatcccaaaggtgatgaaatcgggattgatgcttacgaacacggtgcaactgtttggcctgatgtttacgcagttgaagagtttgttgaagaacaacaaaatcattctaaaaatcctcctattggcacatttgagggttaataaatttgatcttgatttagtcatcatttgataaataattagatccccgattttcttagatgaagtcggggatttttatgtaattatgaacaacgcttggcaagtggggagattcagtggtagatattaattagataaaattaaccaaggtgaaaaatgagttatcgtcatattattacaattgaacctgataaacgcggtggtaaaccctgtatcagaagaatgcgaataacagtatatgatgttttaggttggttagctgccggaatgtctcatgcagaaattcatagactattttggctttagtagtagagtagcaccttgacagttgaaatacaatttaatggactttcgtgttttatttatttgatttgtttaatttgtttaatttgtttaatttgtttatctgttaaattcaagctgattgtatttaaacgattaaatatttcatgtctgattttttcatcagatttttctaaaattaccattcttaatggagtgtttttaaatcttctttgacgtaatggagaaagatcattaaaataaaattcatttaatgagtctaaagtttttaggttttgtaattgcaacttattggttaaaaaatctactaatgtgctaattatttgtgaaccatctactatttctagcttccctgtttcctggatttcagcaacaaaaattaaaggtatgggtaagccaagaatgactgattcaattagtatagatttacggttaacatcccatacaaattctcttttatactctggcacataaatctcacccgtatcatcattatcatccttattgatatatttattgactatgatctctatagtaaactctctagtatcataatcaatttcctgtctcttttcttcaatttgattttctgcaatcctaatcttatctggacgactaattatttctggcatatttttgtaagtaagatttaatagtattagctttgactgggtgattagctggaaaatgagaatatgtcaatatttagtataacacatttgttctaccatgtatcaacagttcaaatatattttctttccctctctgcgcctctgcgtgagactcactcaaccacatcaaaccaaataggcgttaaatcatcaacctgaccattataattaatagtaatttcctgaccttcccgaatatatttataagcaataatctctataacttgttgatcaaactttttcacatacagcgcattaggctgataagaatgattaaaaagagacgcataaccaagagcgatcgccccactttctccatgccaatcaaaataataattacataataccgtatgggtaattaacttaacttgttgtttaggaataacaatcacattggcgatatcaattatttccccaagctcaaaatccctctgagcaaaaacacctcttccttttatttctgtatcacgaactactaacataaatctattttgtctgatctgtgagaatgatgtttaactaatcactacagatagacgcagagacaataaagacaaatttttttcacttacttacggctgctatagtcactataaagttaatatttagagacatcatcaaaatttccataaattttaatttttgttgaggtttatgtgagggaattgtgcaagattgagaatattcatgttattataaatatcccatgctcacgatcataggttgtggaaatctcaatcgtaatgacgacgctgtaggcgtaattattgcccaacgtttacagcaatatctcgccgaaaatcctcaccccaaagtccgtgtttttgattgtggtactgcgggaatggaagtgatgtttcaagcgagaggaagtgaaaaattaattattctggatgctagttgcacagattccccaccaggtgctatatttaaagtcccagggaaagaattagaagctctacccgaaccgagttataatttgcatgattttcgttgggatcatgctttggcagcagggagaaaaatctttttagatgattttccccaggatgtgactgtgtatttaattgaagcggaaaaccttgattttggattagatttaagtgctgctgttcaacattctgctgagttagttttggcagaactaatcacaattataagtcagaatgtgacggcttgattctcagcattcaggagtaggggcgaagcattcggaaaataacctgtgataaaaattgataattgttcgcccgaatgctgaataatgagaattaagaatctcaaatcccaaatccaaaatcccaaatccaactatgcccaatcacggtaaactgagagttcatctaccctcatttcaaatggtacagcattagggtcaggaggacaaacgcgaattttggcactgctaacaataccataaagaatactagccattgggacgattttttgcaaaattttccaattgctaacttgatctggacattcaattactaaagttaaagcactagcatcagttgtcatataccaacgacaatgagagagtaaattttgaataatgcgatcgcatccttgataaaagtaccgactaatagaatattctagctgttgtcgcaggataatatctgctgatgttgcttgcatagggtgcttgtcatcagcattgaattctgattctcttctgctcatttcggttgcttttcctattttatttaccaatggccattacataaagaacatccttattggttagtagaaatgcttgggcttcatcatcataaaaagcaccaataccactacaatctattccccaataattgcaggatagatatactcgttgtccgataaaaccagctaattgcatagcagtttgataactcaaataatcggacacaaaaaacaaagttacagcgcagtctttagccagcgcctgatgaatacacaagtaacctgttttttcactcaaatcacccgactcaatgagattcctaccatgatataaaccgggtgtcataccttcaacacgatgcaccaccgagtaaatttctatttgctcaaaatcttctgtagggattggttgttgaatatcttgccaaattcgccaatagatttcttgagtaatagaatttctgtgaaaacgtcgaatagaacgcctgttccaaacgctctcaaaaaaccgttctcggtgaaaattaaattgaggatgttctagcttttgctggtgactaggtcgcattgatgttgcttgataagcatcttcaatgaattgattcgcttgaaaatagtcagttccacagacaaaaggaatggataaccttaaacgtctgactggcttttcttgcgtctcccccgatatcacacaactactaataaactccttattctcaaatcctaaatcagcattgagagagagtttatcaaagtcaaaaattaatttgatgtttttttcatgaagatacgctgaagctgcaatagcgcccataaggtgtccgctatccaataagcaatatctaatgctcctgtcttgatatttccagctagacctataataaacacaactaactaaaaaaatgcagccgttgatacgtttattaggtataatataactttctaacccatcatcaattaattcataaatcaacgtcagacaattattctcaacttctagatggtagatgccgtttataaatccttcaacctgacgaatttggatataaacttccgtgggatataacgccccagcagagggatttacccggagttgataggtttcatttttgtaaatcttctcaaaagtaatggcgcttgttaacttgataaaagcatgaaatggattattaggaattaatttcactcgccgataaaatttaggataaactttaaaggcgcggggttgagttgatccatccacataattgggattcatttgcacagataggtaagaatgcttggtagcctcatgaaaggctattccataaagcttactgtgtggcatttttcagtaaccttaaaacttctatattgctggcaaagtcaattgctttatagtcatccaaattgtgtaaattcatgttaggattatgttgtaatagcaatctcactacttctgtctttccagccgatgcaccatacatcaggacagttgcaccattatcattttgattgttaatatctatgttggcttctagtagtaaattcattaaatcgtagtgattcccaaaacacgcaaaccacaaagcattattgtgatcatcgttagtggcattgatatccgtacctgcattaattaattctttcaccactgggtaaagtccatctctagtggctttcattaaagctgtatcaccatttttaccccgctgatttaaatcttcgggattgtaattatttgctaatagccattggctggtttctgtacttaatttgagttgatttggttgactcataattatagttgagtaaataacttaaacaagaaaaatatgatggctgattactgatagctgataggtgaatacttaccaaataaaaacggaatggtgagcaatgcccaccatatttaaaagctttatttgaatcagagaaaaaacacagtagctggagaacaattgtgataccaattctttgtgacgttgccagatatttgatccccccaaccccccttagtaaggggggctaagagatgaattgatcatccgggaagagaaaaggtatagcaagcactcaggtaattaggacatcaactgatgacaaaactaagatacaaattaactttcaaatctgtcacctgtcacctgtcacctgtcacctgtcacctgtcacctagtaaaactgttagccggctgtcactggttttttatcatcagcaaacagttctctagcagatttgcatggttttggtacaccataaaaagtagcttctgcttcgagttcgtctactatatcccaagcttcaattgctcgtttagaatctggaccatagttagcagaaattaaccgagcttcagacacagctttctgtatctctttgcgtaggaattttaattttggtttatctacaaagttacccttggtgagaatatcagtcacagaaataatgcctaataattcaccttgaataacaggcgcacgccatgtatcagtattagcaaataaccgcgctacatattcaacatctaggtcaggattgacaactacgcagggtttagtcatcacttcgtacacatgaactgcttcgggatctctaccaaaagctgcaactttgcccacgatatccatttcggtaatcataccgtaagcatcgccactgtgacgaggttcaaccactaaagcccgcagttctttgagcctcattagtttgactgcttctgctacggttgcggaaccgcgaatagtagcaacgtcttgagtcataatttgtttggctctcataattcctgctcctttaattcggttgagcgaatcattgaattacttctaaactgctgcgattctcctaaactttttctcggtagtttttgcacctttgcaccttaatcatcaatagatattgaatagtgaggcgtgttatgtactactggctaaaaagcaattacttgatgtgaacattcctaaaccgaattattaataatctgagagattttcatgaatccggtgattttagaaataagatttacgcaggttctatatattttcatctaccgttcttactctttaccttggttgtggtttaactggggatcaaagtaagaggtttgggatttactctgtaatcgcttcttgttgaggtttaggttcactgccaacaatttagcttacttatatagtatcactctggtcagcaggaaatatgaatgatttataaagatccacccatttttgaccataaatcggattaaaaaattgttaagtggatgacagaagcaaaaaattatatttgatgtttttgatatcagatattacgatttattatgaaatttattagttaaacatttaggaaaattccattaaataaatataaaaattattgactagaaatactatttctgaattatggcagcagcggaaaatatgaggtttgacaaaatatatgtttcatttgtagtcaatagatacatttttgggttatcatagttataatctaggtattaattaacaacctggttaacttatcaatatattgaagactgacgaagtacatcagaaattgtaaatgtgaaattggaactgtgagtttatgctgttaccagtagaattagcaaatcaaactttatatgaacaagattattatttgtggttgcggacaactattaatcaactgcgtgctggacaattttcatctgtggatttagagaatttaattgaagaattagaaactatgggtagaagtcagaaacgagctattgaaagtttattgattagacttctcgaacatttgttaaaacttaaatattgggatagtgaaagagagcgtaatgagggacattggaaaggggaaatcaggacttttcgcagacaaataaaaaaagaattgaaagatagtcctagtttgaaaccttatattttagaaatctttgaggaatgttatgaagaagcaagaaaagaagcaagcgatcgctctcaacttcccctggatacatttcccataaatcccattggttctttagagcaggttttagatgataattggtttatgagataagaattattatcaaatttaaataattcatcactatagagattgctgtacaatcatttgccaagcttgaatatgagcatctttaacttcagtggagtttttcgcatctctgatcaactcccctgtatatgtattgataaattcattataatcttcgacaaatcgcaaataatattttacagtgttaataataccattcccaattatttctaatccagtttcttttttaatcttcagaaccaattgtttaatatattcttcttcattttgattaacaaaacaatctttgtatgttgtcagaatgtaatatcttttgattgttgtctcagcagattttttaactatatctaatatcatatttctatctatagggatattgtgttttatctctaaaatttcaaatggatgattattctcatcattaatttctatatcaccataaccatgtttatcagcagaggtatgaacatttaaagggagtaatattttattttcaaatctacgaatgcttttaaacagttgtttataaatagcataaattgcaatcactggtagtcgagaacttagaggttctccaaaatgcctttctagcattttcataactatatcaatattgagagtatttgtaaaatcagcaatttctagagtttcagtaaaaacagcttcttgagattgtataataatatgcaattgagtaaatatataaattaaacaatcttcaatatcaatactttgattttcaattttatcaatcaattttagaaaaggttcaatcaagcttttacttctcaatggcaatttaactccctcctcaaaattccaaataatttctgctcgtgttgcttttgttaaaaaagcagtttccttattagcatatctaggaaatttatttttgaaaaatggtgtagttaccttagtatcaagcacccttgcagaatatccatttggaaatttagccatgtgtaacctgatatcttgttcaggttgaatgattttcttgagtaaactggtaataattacctgaattaaagatttatcagtttctattttttgaataaaaacatctacactatttttgatttcctcgtcaatttctgtcaatgattgattttcgagcagttcaagtgcttgttgatagtagttttctaaaatttctatttcctgttgataattatatttcatataaataattcctgttgttgaaaattagattctgccatacggttattagctagattaacataatcaggattaatttcaattcctaaataatgacgatttaaatttctagctgctaaacaagttgtagcactaccacaaaaaggatcaaggacaaaatctccttctttacttaataacttaataagttcctgaataatatataaaggataaacggctggatgatgattatttttagttacttctaccggactttctataatatcctttttcatggcgtttcctaaaatcctaataatcgtaaatccattatttttaatttggttatttctgcccccatcttgaccaccataagccaacttatgcacgccatttattttcattctaaatccttcaatgtcgccattatgcactgctaaaattgcctcatttaatgctttaatggcatttgatttttgttctgcactcaaatcagaatttttaattaattccaggtattttttacctaatttatctgatggtttagtttttgcagttttattgaatgtatctaaatgttgtaaataattgtctagattaaaatagtaatctttagatttagcgaatataaaaaaaggttctgtagcttgtattaactttcttttatcctgacgtggtgtagggttaagttttgaccaagtaatctgattaatcacaaaaatattattattttcagtggcttgaatagcaaatttataaggtatgagagataaactgccactaatatatttatctcctaaattaaaaacaattgctcctgtgcttttcaaaactcttacacattcttgaaaaacagttagtatattgtttaaatattctgcttctgtgggttcattaccgatttctaaatcaccattaccataattacgttgctgaaaatatggaggtgaggtaataattaaatcaaaagtatcattttctatttgtttaagaacagataagttatcaccaaggataattttatcttttaattttgatatttcttgtaatggcatatttatgagcaaccgacgtttattgaatctgtaatttatacagtatacaatattccggtcttttggatcatataataccaaaaattatttttattttaataatctattagttccaccctcaagcacacgcacataaatagcccgtgcagtttgccgatctaaagtcattgatacatttccagccttaattataaaagccggaaaatgctgctcaacagtgatattagttcctgtatgaatacccattgatatcagtttctttctaatagttttatcctgagtttgacaggcagtaacaattcctatctctcctggtttgagcaattccaaagagcaaccagttacactaaaaggagtaaacattgccgaacaataattaaaagtcaaaagtgaaacttgaaatgatgaaagatgataaacatcctccatcatggtaaaagttcaattatgggtttaattagcaaagctaaaccctaattttgtattaaaccaaataagcttcttggtgggttttgattgtacagttggagcggggataagtaacgcacaataaagcaaaacctttttctacttgttcatcatccaagaagttttgatcatcttggttgatttcaccttcaacaattttacctacacagctagaacaagaaccagcgtgacaagaaactggtaaatcaatacctgcatctgctgctgcatcaataattgtgacatcatcatcacagtcaattgtggtgtctaattcttcttttttgttgatcaatcttactttataggttgccatgttttacttctcctcaaatttgaatagaacttgtaatttggttgcttactgtttacattttcagtaaggtaaatcatctcttccgtacacaaaaaaatgtagagtgtgtctacggaaaagttgtaaatttgtaggtgatggaatggaacttagaaaagtttccatatctattttttcctaagttccaaatctttttagctgcaaggtacaccgttaggtgaacaatctcctgatttaaaagatttgccacaaccacaggtgtcagttgcattggggttggaaaacttaaaaccgctatccatgacaccctcaataaaatcaatgactacaccttctaataagggcgcacttttagcgtcaacgtaaatcaatacgttaccttgttgggtgacaatatcatcaggttggggcttattggtaatttcaataccatattcatagccactacaaccaccgtttttaacggagatgcggataccttttttagcttgattttcttccgcagcagaactttttaaaaaagcccgcaaacgaaattctgctttttctgttaaagtaacagtcattttgtttcctgtagcgattattctgattttcagatgtaggttaattattactgtggtggtgaaactttaaactgataaagattgagattgggaatatctccaaggtgctgtattaccgcagactggacaattgcgatcgcgttgagaacgacgtttagcaaattccattctactgaaatcaattgttagcaattccgataataatggttgactaaaaccggtaattaacttgatagcttccaaagcagttaaacaagctaaagttccagaaacagcccctaaaactgaaaaaccccggcgatcccaatctggtttttctggaaacaaacaggacaaacaaggagttacaccaggaataattgttgttaggtaagcctccattccatccattgctgcttccaccattggtttacgccactttacacaagcttcatttaataaattacgctcggtaaaattgtgggcgcagtccaaagccatatccgcagattgcaccaacgaatctacattttcgggggtaatataatcatgaattgcctcaatttgcacatcaggattaatagcttccagagtttctttagccttaaaaactcttggttttcccacccaatcatcagtcattaaaatctgacgattcatgtcatcgagacgcaaatcaccaccccggactaggatgagccgcccaacgcccgctactgctaggtaaagcgccgccgttccacctaatccccccacaccagtcaccagaaccgtcgctgacttcaggcgcttttgagctatttcgccaaaattcggcagcatcatttggcgactatagcgttctaattcggtaggcgttaggttgatcaatttatacctcctagtcagacgtgatttctgttagcgtaactacattttttggtttgtcattgaacaccttgaacaatttttgttcgtggggtgttgattctataaaaacttgataagcttgttgcaaagcttggctgtatttttctaacttttctgctacacttagattaggatattgctcatcaatttgatacataaattgagagaatttttttaagatatgcagccgattgacattgacaaaatgttgatcgtaaggcagattaaaaaactggaaataagcttctgcatctacgatttttttaaattcttcaatagttccagtcatttaccgttctccattttttttagttgttgcttgagttgatctaactcttgatagattttgtaagtctcattggcaacatccatcaatttttcgtaatctgtaggtagtccttcagctaaatcatgcagatccattttcatttgacctgctttactatttagctttttaatcgtggttttcagttcttcaatggtcattggtgattggtgattggtaattggtaattggtaatgggtaattggtaatgggtaatgggtaattgggtattcttcccagtccccagtccccagtccccagtccccaatcaccaatcaccaaatattacaaattgcctacttcggggaaacgtttggctaattcaattcctttttcaacaaacttttctccctcttcattcagcttttctagagattcaaaaccaaaacggtgagcatcacgtaaggttttaatagttaataataatcgtccagaaaaaactaaagcccaaccaaaaccttcatgacctaattcaattaccacattagaaagtaatccagtttccttttctatgcttgaggcgatcgctctaaaaaaagcattaatgcgagaaagagtagctggatcaacttcaccttctgtagaaatttcttttttcttttgttttgtcaccacaaaaggtttaagaatcaattcatcagaccaatttttgtaaaatccatagctatcattagctcgaatttgttggactaatgttttcagaaaaggtgaagaaattatcgtgcttgttgcgtttccgttcacactattattttcactcatatcgcagcttcgttttcaatttcctctaaaaagttagatttcttttgacctaaagctttacgcaaccaaggtggaggattccctttcaaagtttgcaataatttagtcaagatttcttcaatcttttcttcttcagatttcgccttaacaggtgtcacaccatgcttaattaaacgagcggccgcactaccaccaatagccactacataaactattgtacaatcttttaaagcctcaagtttaggggtaattttatcctcattaccatcttctttaagatcaccatcaaaagttaaagtttcgagaaattcatatccttgatcggaaatttcataaacatcaatttccttagcccagccaaaatgagcattaacatgaattctgtcagttgtcgtaaatgcaattttcactttcatttgtcctttgtctataaaaagagggaatagagaatagggaataggaaatagggaatagggaatagggaacagggaacagggaacagggaatagagaatttctcgttcccatactctgtatgggaatgaattttaaaggctctgcctttagtgatcccagagtcagagactctgtgatggcattcctagtcagagactaggaacgagataattacccgttacccattacctgtttccactggttcatcattaacgcttcttcgtgttctatgaacaaattaccaataccaaataaaacatccatagaaccgcgatagcctaccttggtaaataagccatttcctaatctgtcgtaaataggaatacctaaacgatagagaggaatagaaagacgtttagcaatagtattaacattagaatttccaattaataaatcagaacctactgctaaatcttccaaatcttctaaatcgccaatagtcacatttttaatgggtagatgctctaataaaggtgattttgtggtagttacagccccatgaatttgcgcccccattgactggagaaaatgcaccatagaccacattaaatccggttctaaggctaaagaaatccgttttgcaccaaaataaaaatgagtgtctaacatcgcatcttgtagctgacgacgttggcgacaatatttttctggtacgggatttccacttaacacagataaggcttgtagaaactcatccacaggttctaaacctgttaaatctctgaaaacttcgtagtctgtgttaaacctttgctggagaattttagctgctcctcgcatactttcacctaatgcaatagtgaaagcagaactacctaaagattgcaattgtttgagagttgtaccactagcagttatagcactataattatcctctaaatgtccatctaaagaagctcccaaattaggcacaaaaataggatctaaaccgaaggatttaaccatttcttcgatttcttgaacatctcccggagtaaatgcagaacccgctaaaattgtgatttgttctggttttacccctcctgctttgggaacttctttaacaatgctttctactgcaacggcaaaaccatcttgcaatgcacctttaaagtcaggagtgggagcaaaaataatggctaaatgatctaattctggatgacgttttctaatttcttttaaaaaacgttcaatatcatcgcctctagtttcagttaacccagtggtacataaaccaataatttctggttgtaatttttctactactgttaaaatagcttgttcgacattttcctcaccacctaaaatagtagtaacttccgtcattgcggtagtagctaaaggaatcgcttcccgaaaatgccgaactaaaacaacttttgcaaaagcagtacaaccttgagaaccatgaaataaagggatagttccttttaatcctaaaaaagctaaagatgcacctaaagcttgactttgtttaaggggattaacagaaacagatttttctggaagtgtaacaagtgccataaatataatctcaataattgaaaattgaaaattgacaattgataattaataattttccattatcaattatccattatcaatttttaatttattcccaaggtgcgggtttacgaatttgttcccaaattgggctatacaaagcttcgtataattcccgtgccatttctaccattcccatataaccagcatagggatgatgacgttcttggttaatatctaaaaatgggattctggcttttaatgctgtgtactgatttcttcccccagctattaacatatcagccttagtatcttccactaacttgagcaattctttggcatttcctttttctaacataatgccatcattgcctaacaatttcttgattttggatttatcttcttctgtacttttgcgggtactggtggcaacaacttctattcctaaatctttagcggcagaaataattgaccaactttttacaccaccagtatagagtaccactcgtttacctttaagtctttctctatagggtgcaagggcaatatctaacgctgctgtttcttcagcaattaatttttctgtccgtgcttgtaaatcaggatctcctaattttgcagcgacatttctcagacaacgattaatatcatctataccataaaatgattcttcaatgtaaggaatatcgtaacgttcctccattttccgcgccatgtttaataatgcccttgagcatatcatcacattcaatttagcgcggtgagcataagtaatttcttgatagcgagcatcaccagtaattttagataaaacgcgaatacctaacttttcaaataaaggtaaaacgccccacatttccccagcaatattgtactcaccaatcaaattaatatcataaggtgtagtatattcaggttcagcagtaccgactacataatctaataatgattcaccaccaaagcggtttcccagatttttactaccgataaaaccaggagaaataacaggaataaccggaacaccaattttttcggctgctactttacaaactgcttccatatcatcaccaattaaagcagttacacaagtagcatatacaaaaacggcggctggtttgtaacgtttgtgaattgcgagaatgccttgataaagttttttctcaccaccaaaaattacatcattttctgttaagtctgtggtaaaacctgtcttgtataacattggtccagaggacaaactaccacgacttccccaagaatttccagcacaagcaataggaccatgtaccaaatgagcagcatcggtaataggcactaatgctatcattgcgccatcaaaagcacaaccaccttgagcagcaccaggttgagcttgttgggtacaggatttgtttttcttttctccttgttttttttgattatgttcgcatcctgattcattcagaagttcgttaattttgctttgggtcattttcatatttatgtctcgcctgggttgatttttattaattaaaatgtcagcaaaactctatagacttaccgcaaaattcctctttacattagatttacacagttaaattttcagaaaagatatctatttatctgtaactgaattttaataacatcaattcttgataattgctcttctgtttagttgaatactaataactaatgacgaatgactaatgaccaagaaaaaagtaatgggtaatgaataataattgatgtttagcaaatatattgcgtcacatcttcgccacattcgtcaacaagatatgacaaggaccgaaatcgtaaaccgacaacttcgttatacagaggattgatttgacaaattgagggaatatggaaagtgcgaccaaataaattaatatctcgctcgaaaggacaacaacagggaattactcgacaaattagatgggctaggtgatagtttttaacttggataccatctactaattttctcaggggacggaaaatgtcaaagtttccggggttttggtagctgggtggatgatagttaggatgaggatgagaatggggaatagatgccataatgcaaacctaagataactacaatttagtaatcagtaatcagtaatcagcattcaattattctgactgctctacgggcgaagcattcgggcgattaattatcaatttttgtcgaaggctattttccgaatgcttcgcccctacgattcctgttgtgatttactggaatagggaattgggaaataatacccaatccccatttattctttgttgttttgctagtagtcagatgtttttttaacacctgactgttgatattcttagcgtactaagtcgtaagaaatatcggtcttaccagcaacgttggtgttgcgatcgatttcttcaaagattgtgttaacaacccagttcaacaagttgattacacctttgtaaccgatggttgcatagcggtggtagtggtgacggtccatgatgggataaccgattcttactaaaggtacaccacaatcacgccacaggtacttaccgtaggagttaccgattaacaagtctacgggttcggtgaacaacaaggaacgtaagtgccataagtccttaccaccccagattttagcgtctttaccaaattcgctagaatctaacagtgcttgcagttctttttcaaatacttcgttggtgttgtgaaccaaaatgtgtacaggttcagcacccatttctaacatgaagctaacaacgctgtaaactaggtcaggatcaccgtagatagcgaaacgcttaccgtgtacccaagcatgggagtcggtcatagcgtcaactgcacgaccacgttctacttctaattcagcaggaatgggcttaccagttagttcgctgagtttcatcaagaattcgtctgtacccttgataccccaaggacgagcaacacaaacatcttgcttccattccttagcaatgtattcacgggtcttgctcagggagtaagcttgaagagcaacagtagctttagcgttgatggagtctgctgcatcttctaactttgtaccaccggggtacatattgaattcaccatcgttaggtgcgtcaacataatcactgttgtcagataacaaggtgtagtcaatacccatcaattcagcgatgcgcttaacttcacggttgttttctacataggtgtcaaaaccggggatgaagttgattttgccattgctggtagctttcttcttacctgcggtcaggttagaaagaatgcccttcatcatgttgtcgtaaccggtgatgtgagaacctacgaagctaggagtatgtgcgaagggtacggggaagtcttgaggaactgaaccagcgtttttagcgttggtgataaacgcacctaagtcatcaccgataacttcagccatacaggtggtgcaaactgcgatcatcttgggtttgtacaatgcgtaagcgttagccaaaccatcaatcatgttttgcagaccaccgaaaaccgcagcgtcttcagtcatggaagaagaaacgccggagaatggttctttatagtgacgggttaagtgtgtacggaagtaagcaacacaaccttgagaaccttgaacgaagggaagagtgccttcaaaacccacagcagcgaacatagcacctaaaggctgacaacctttagcggggttaacggttaaagcttcacgagcgaagttcttttcacgatattcccaggtctttgtccattctgcaacccgttgaacttcttcgggggtgtgagcgttttcaaattctttcttgttttggaacagttgttggtattctggctggtggaatagctcaacgtggtctttaatattttctggattctgaggcatttctagttctccaagcttgctgtgtgttgtgtttcagtgattttttggtggggtagaggcggggttttcccgctcgtttttggtggagagtggggaatgtggctcaaaattcagaatgcaaaattcaaaacttagaatttttgattttgaatcttgaattccctactccccctggggcgaaaccccagacttttcctatccggccagggttgcccctactctgttgttacctagactgctgctgtagcttttcttaaagctttctttgcagacttgttccagggagcgccgattaatccccaggttgggctgttgagtgccaaatccatgtcacgagcgaagattgcgaatccgtcgtaaccgtggtaaggaccggagtatttttattaatggtttaatagtttgtgaatgcttaatgtttgtatttaaactgaaattaagttacaattaagctaaaattacaatatacaccaagagaagagaatgattaatattaattggggagaaatcccaatcaaacaaagattgattaattaatagaatagtgccaattatcgagaattttctaaagaaagatgatttatagcaaattatgaaactacagttaaaaccagcaggaataaatcataatggcatatttattagcagaaatgttgaatgtcgttacaaaagtttacatattcagttatagtagtcctattaagggtgaaaatgtcaacatctcatgatatcttccatccaatgaacataactaatttgttgacacatacaa

SEQ ID NO: 54 - DNA, 36710 bp, Sphaerospermopsis sp. LEGE 00249
  LEGE00249_69
ttgtatgtgtcaacaaattagttatgttcattggatggaagatatcatgagatgttgacattttcacccttaataggactactataactgaatatgtaaacttttgtaacgacattcaacatttctgcaacaattcctatttctctgcgttctttgcggttcgttaaaaaaaattagtaaaaaaattgtaaggtgcgttaccaacacaccctacctatcttgcttttcttaatgttcagccccagtatgtacagttttcacccacttcaaacgcttgggacgaactgacatccgggcggtagtgctactcatcaccaccaaccaatgcaacatataaatactgccgcgaatggtttgcagaagtaacaccaaataattagatgttttctgatcttggcgtgtgcgctgtaacccagcaaacatccccacaaaagacatcgttaccgacaaaccagtaacagaggctaatataggtggacgatggcgaatgacagacattaataaatccggtactgctgctgtcggtaaaatatacataatcagcagaaaaatcagtaaatccacagttttccgcgttcccatgcggtttttgaggatcagatcccagtaatctaaataacgctgataaccaccttcagcccatctgttacgttgatgccaaagggcgatcgcagttgtcacaccctcttcctgcactgggggatagaacatacattcaatatcccacttatcgagattcaaacggatagtcaaatctaaatcatcggtgatggtttcctcattccaaccaccacagctatccaaagcttgacgacggacaaactgaccatttcctcgcagttcacccagtccaccaatagcggttctttgttgttgaaaccaagtatcaacagccatttccgccatttgtcccttagtccagaaattttccttagcgttggcgatcgcctttcgcacctgcaccgcccccacctgttctctttggaacacaggaacaacttgtaacaataaatcagggttaacttgggcatccgcatcaaacacggcaataatatcacccttagtcataggtaatacctgattcaaagccccagacttaccgccaatagcatcagcagaacgcctgaaaaccttgagttgcttgtattcttcctgtagttctgctaataactgtggtgttttgtccgtactatgatcatcaataatccagacttcatattcaccattagcatattctaaactacaaagattcttaaccaatctgcctatgaccgcttcttcattttttgcagctaccaacacagaaacacggggtaaatctccctgtatttccttatgatggtggcggggtctagcaaaaataatcctgaacgcatgaatgcttaaaattgccgtcagtccaagaataaaaatagaaccccaggaaaccaaatgtaaagcaatagttccaccccaaaccacggttaaaatgaggacggctttgggtctacgtccttgaaagcgggatgaagaataaacagtcttgatcccttccgttaactcctcctctgttgaaaggtcagacagcagggagttaagaggatcagaatttccgttgtaagcgtcgttttccggccaggaattcgctggcatagtttaatttaagtaaaaaaccactatttgtttaaagtttacagtttttacagcagaaagcccacaattaggtatttagcaatgctaaactccgaccgacttaacctgtcgctttgtgagatcaaaaaagtctgactacaagaggttttagttttaactgctgactgctgactgctgctacagcaaatatttttcttgacctgtgtgaaatcacatacttatgggaataatattgatgacaactcaatatctcctaagtttagctaagttgaggaattttcaacgatgtctatcgaccaacttcagcctgtgagtccgcaacaggccgcagtatatttaccttacatccagcaaagcaaaagaaatttcttgccctatgccatcagtctttatcaaaaaggttttatagagggacatcgcaaaatagaagctagtgacaatattccctttgttgctacatggaatgttgccaccctaccctctgatctcacccgttgccgcattcaatttgatggcaatgctgaattagtttatgaagtaatgatggccagttatgagtttattaatttcttaattgaacttatggaaaattataaacgccaaaaagttagtgatttttctacagctttttaccgcaaactactgcggatagaagattgaatcaggaggcaggaggcaggagttttttattttggattttggattttggattttggattgtttttgtgatctccaatctaaaatctaaaatctaaaatctaaaatctaaaattttcttccccagtccccaatcaccagtccccagtccccaatcaccaatcaccaatcaccaaaatcaacgatttctgttgcttcagctaaaattaggaaacacctagctgggttcaacagacgtttgaaattaggagtgcatggcgtgccaacatctgttaaatatttgctgattggatcagtagagacttacagtggtaaatccgcaactgttttgggtttgtctcatcagctaaagcaaaaaggattggatatagcttacggtaaaccattgggtaattgtgtacagaccgccgatggtagcttagtggaagaagatgtgcagtttatttctcatagcttgaaactgccggaaaatcgtgttgcacccaccttacttgctttaaatgaagtcagtgtccaaaaacggttacgtggtgaagacaaagctgattatcagcagtcactggcacagcattatttacaaataccacggggtgatttgatgctgttggaaggaccaggtaatttaccagaaggtaatttatttggcttatccttactggaagtggctgaagttttagatgggggtgtgctattggtacatcgttataaatccctgctttcggtagaggcgttgttatctgccaagaaattgataggcgatcgcctagttggtgttgtcattaatgaagttcccaccgaacaattagaagcaggtcataatctcttacgtccatttttggaagagcaaggcattcctgtattagcaatgttgccaaaaagtgacttgctccgtagcgtcagcgtgggagaactggtaaaacaattacaggctgaagttctctgtcgcagcgatcgcctagatttattagtggaaagtttggccattggggcgatgaatgttaacgccgccgttaaatatttccgcaagcgccgtaacaaagcagtagtcacaggaggcgatcgcgtggaaattcaacaagccgctttagaaacttctacccaatgcctgatcctcaccggacaactaccccctcccgcctttattctcaatcgcgccgaagaattagaaataccgattttatctgttgacctcgataccttaaccacagtggaaattgttgaccgcactttcggacaagttcgtgtccacgaacctctcaaagtagagtgcattagccaattaatgtccgaacattttgacattaaccgtttcttatctcaactaggagtcaaaccagcagccgctttatcttagtcggattattgacccaaattaccagtttcactagtgtaaatcctaccattgcctgtttccaaagcctgacagtgaacagtaattttttccaactacctattttgttaaagcactgccatcaacaaaatcttttgttacttaacaaaataatcaagaaaacagagaaatctgtaactctagttggcttcttacctacacgctgtttgatagaatatctaggttgtttaatctgatcacctccatctttgagccagtcaacagaacttatcaaccttgatacattagcgcaggaactggcgacaatccagcaaacaggttctaaacgaatcgccttgttgggttcccgtcatgtgccaattactcatcaaaatctcattgaaatgatgacttatgccctagttttatcgggcaatcgcatcattacttccggtgctacaggtactaattccgctgccatcaagggcgcaacacgggctgacccgaacttattgacggtcatcctaccccaaagcctggaacgtcaaccttacgaatcacgccaacaactagagcaggtcatgcatctagtcgaaaatcccagtaatgataatctgtctttagctgaggccagctacctgtgcaacaaggagattgtctcccgttgtcagcaactcatctgctttgctttccacgacagtcgcaccctgctacaaacctgtggagaagcagaagaacaaagaaaagtggtgacactgttctactttgattaaagtgaaacgcagtctccacaccgctaatgatagagatgggtaattaccagtgggtactgggtaatgttttatctaaattactcagtattcctttgcgctcactaaaaactactaccagtatttattaggttaatgtccctattgcaactacctatacctgctatttttttgtactctattgctgccgccgcagttctcatttatgtaccgtttttattcgtagcttacggtcgggcgcaggttggttttgatttatctgcccctcgtgccatgtttgataaattgcctccttatgcccaaagagctacctgggcgcatcaaaattcttttgaggcattcatgattttcagtgctgcatctctaatggcttatgtctgtggggtgaatactcctttagcagcaatggcagcgatcgcctttatccccgctcggttactatactctattttttatattgccaatatccccattttgcgatcgctcatgtttggtattggctcttttagttctgccactctcttctatttgagtatcatgaaagtttcaggataggtgataggtgacaggtgacaggtgacaggtgacaggtgacagtaaatcattagttacctattaccaattaccaattaccaaataaaacatttcacattcaatttttttatggcttctagtttttcttttgatattgtcagcgactttgaccgtcaagaattagttaacgctgttgatcaagttatacgagacatcaaaagccgttacgatctcaaagacacacaaacaactgtcgagttaggcgaaaacagcattactattaacactgacagcgatatgactttagaggctgtacatggcatactgcgggaaaaagcagccaaacgtaacctctctcaaaaaatctttgattttggtaaagttgaatctgccagcggcaaccgcttgcggcaagaaatcaacctcaaaaaaggcatcagtcaagacatagccaaacaaatctctaaattgattcgtgatgaatttaaaaaagtccaagcctcaattcaaggtgatgctgtgcgggttacagccaaagctaaagatgacttacaagctgtgatccagagactcaaacaagaagattttcctgtagctttgcagtttacaaactatcgatgaactagggacagggtacgtaggaacttaaaaaccttgtatttaagtctgactcagaggaaaatgttttgcccctaaatactggaaactgttccctgttccctgtctccaagacaatacttttttagcaaaccctaaataattaaaattatcataaactactgtctatagattctagataaaaactataattggcatcagaacaatcaatggattgtggtgaactacaagtgctaatagcttgaaaacgggtataaattgtgttgtaattacgactatatatttgtgcaatttcattcgctttttctgaaacagttgttccaggaggaatactatttaaaaattttattgcttgtttaagttttaccattgcatctcgtagtctagctaaagtataaggcgtattttgagcaattttctcaacttgtttagctaaattttgcgcttgtttatattttgaaacagccgtttcttctataattaatctttggttaattatagtatagttagacttatactgttgtaatctatcttgttcttgtgcataaaaaggtgaatttttcggtattctttctaaaagattgattgcctgttcaagcttatcccgactttgtttccaagtcgtattagaatgtggaggtttctgagtgatttttactgcctcccaactcaactttttagcattttcaattgaatcagatacttgtatttcatctgataaacgtgctgaaacaacagcataattattacgatattgttcaagttttgtttttgcttctacagcaacaaaagaatcttcaggtatcgactctaatatactaattgcttcttgccattttgtacttgcttcattccatacggttgctggaagcggtggattttgcaccaaaatacttgcctctattgctaactgttttgtagactcaaacttagttgctgcatcttcttctatctgtagtcgcttctcaactgtatcgagttgaacgcgaaatttgctaatatcctgttgtgctgcggggtatgcagatgcaaaagaatttggaattttttcaagcgatacaattgcttgtttgattttgtcacgcattagtctgatttcattaatgtcttgtgcttgttttacatcacttatagttgacattaacgtttgtacattccaaagtaattgttcttgagaaaaacgcttccaaccaaaccaaacaccaggagtaattaaaattaaaatactcgcagtaattgcagtctttatctgaatatgttttcttcgctgttggtgatgacgttgtttcatcaaagctggattctttaaacattcctgcgcttccttgatttttacttctccttcctgaattaaactttcaatttttggttttaactgctgacaaaactttaagatgtctaaaactttttcgcttttatgattaaaatcaataaataattcatttttttggctgaattccaatgcactaatactgccgaaaagagctaaaatattttctagtgtagtagatttaatataagtaattttgccgatttcaactgtattaataatgttatttacgtttttactgattaaaattaaatctttttgtacatcttgaatttgttcaagctgatgcagcattacagttttgttagcaaaattaaaagtagttttaattgtacgactcttagttttgatatcatttttaatatcttttactgttttatttgaatttacttcttccaatgcgtctattaatcttgggtgttgagtacattctttcccaaatgaaacaagataagttaattgcagtgtaggttgttcaagaatttgcttggaactaatacatttgttgataacagatgtcacagattcgtatagagaattattatataaaataataactccattgtcatctaaacctaatgcggtaatagatttaccaaaaacacctaataatgctgttattacatcaaagtttaatggattattaccttgtttattaattttctttgtaactatatttagttgtgtatataaattttttagttgcacgtgtacatgagacatacgatttaaattttgctgcattacaggaagactatcaaaatttaatcttctttctgctgtttgaataacatctgcaacttttgcgtgtaattgttcaatactaatttttggttcttcttcaaaaatacattttaagatgtctttattattgatacaggtatttataaaattttggataaattttgcgggtgctataattgaatttattttttgctcatgctcctcacattgtttaataatatctaataatctatgctgttggttttcaatataaatagtcacttcatttttattattaaattctattcgtgtaattgctgaaccaaaaattaagaataacgattttatagtatgattactaataccccaaaaacttgtattatcaactgaagacgataaactattaaatttattttttattttaattaactggtctaatgccagctttactgatgctgcattctctttgattatttctgtttgaagcaagccaaaatctaaccgaatactgaatgataatttggatatttgtgtagctaaagacggtaaagtttgggaatgcttctgaatttccacactcaaaacattatctgatccaagaaaacattgagagctaatctcttttagccatgttccttgctcaataaaaatatcaatcgtctgtactaaatccgcaaaggttttcttaacctgccgcagatggttttcatcatgaattgcttcatctaaaaaattttctccaatttctaaagcgatttctgaacctatttgcgagaatatattatcatcatcactacctttttgacctagtaaaattaaaccaatagctacaacaccctttgctagacgaatagcatcaatccgtgcaatttcatcttcgagtttttttagtgtaggttctaactcaccttttatatgatgcaaatctaaaattgtttcagaaattagaattaattgtttttcaataccatctggattatgaaaatctaatgacatcaaactaccaagcttcaaggttttatcaagtatttcatcaaggttgttcatacgttagaactcaaatgtaatatgtctcagaaatatagtgaagtgactgcctacttttccgatatccatttccagaattggtaagcaccaaaaccaactacggccgctgctgctgctggtgcggccactgtaatagcaacaccggcagccattccacctccaactgttgctccaactgcggctaaaccagaagtaattccagcagcactcaaacctgcaacacttccggcggctgcaactgtaccaactgctccagcagtaccagctactgcgcctacagtggtcatagttctaccaacagcacgagcttcacgctcatcatcaggaagactctcatcatcctttaaaacctgatccatagctacttttgtaatagcagcaggagcagcaccaagtgcgccaatacccgcgactgcaccacctccaacaactccaccaactgtagctaaacctgacataataccaacaccacttaacccagccgccgcaccagcagcactgacaacaccaagactacccgcaactgcggctccacttccagatgctcccgctcccactgctcctgcattttttacttgttcgctggcgtgtacacctgttttacaccaagtagcaaagtgttcacaattattatcaaataggtgataagcatcttctcctaatctgctttcagcacgccaaaccacaatatctggtgtatcacactggccgtactctcttacaaaaaccgtgtttccagatgcaaaggaagcccaagaaatatgagaaatcttcccatagttctttgtataatgaataactgtaccatcaccgcagtctataccatgatggctgtaagcaccgcaattatagtaaacgtgatctcctctcatgctctagtcaccttgaatactcgaattttatgaataacaacaaaataaaaatgtgcctaacgggacttaggcaaaaaacactgacaaaataggatcaaacgtatactccaattgaccttgacatctttttgattagtttgttggtatatctaggttacaggcgtttttggtcatttaatgtacttatcttacgccgcaaagatttgagtcttgttttttactaaaaaatatttaagtcccgctaagttattaggacttaggcattgagaaatccagaatctgtgtattttagattatgtcatcattatttaagattagcaaaaatattggtaattggtaattggtaaaaataaatttattacctactcaccaatcaccaatcaccaatcaccaatcaccttttaccgatactgtttttaaacgctggacgttcagaaattttctgaatatagttcacaacggctggatattcactcaaatcaagcttgagcatgatgggaatataagcgagtatagatcccacagccacatcggcaacagtgaattcatcaccaagtaagaaaggttgccgcccaaaaatttcattcagggtagttaataggcggggcatttctcgctcgcggttggcttccacaaaaattcctgtagccaaggtagaattaccaaataagacccattgggaaaatatagcacgttcctctagagaaatcggatttttaccatatttttccgcaatatacagcaaaattgcccctgattcccatagtttcaaatcaccatccacaattgctggaactttgcctattgggttaatttccaggtattcaggttgtcgatgttcacctgctttcatatccaaaaggataaattcgtagggaacttgtagttcctctaaataccactgcacaattgatgcacggctaaaagcgccaccgtaaagtttcaacataataactgcttaaaatcaaagaactttgtgagtgtgagaatgttgtttaacgttgtcgtctttagtgacaactctagcggcatttagcacccgtttgcgttctgtagaataattaaaatcggttttggttgttcctgcgggaatcagggtttgggctgattcacgacgcttgtaggtgcgagcagctgaaaatgcccgttgtacaaattcatctgcaaactgtgctgaatcaggaaatccatcaggcaataacagcttatcaccatccaagatacttcccaaagtagttgcacaggcaagtttgtatgaggtaggaatgccttttaatattgcttctaatgctgctgagggaataggttctataacttcgatttggtgtacttctccatcttctttgtaaaagcaggttgccaagccgatcacaatgtaatcatcggctgtaaggtctaaagcatctgcataagaaattgttgttgtcataggaaatttactcaaaattaaattgtactgggcattggacattgggcattgggtaacttccgatacaaaaaagctaactaatgctaacaaaagttggctttttcttcctgtttcaccagttcgactacgctcactgaactcctagaagtgtcggcactatctagtccacaggctaacacgatcaatctgaccgcttcttgttttaaattaatcgcagcgtttaaatctctgtcaatctcaaagccacagttatcacatttaaaaactctttgagataatgacagtgatgatttcttttctccacaagttgagcaagtcttgctactgggataatatctatccacaattactaacttactgccatacagttgtgttttatattctagctgccttctgaattgataaaagcccatatctgatatagcttttgataatttcccatttgctaacatccctgatacattcaaatcttctatccctatcaccgcgtggtttttgctgatataggtggtgattttgtgtaatgtatcttttctgatgttggctattttttggtgtaatcttgctattttgatttgtgcttttctataattatttgaacctatgagtttatggcggttcaaatattgtattcttgctaactttttctcatactttttataactttttacgccatcaaatatttctcctgttgataatattgctagatgatttattcctaaatcaactcctacaaactcttgatttttctgggtttgagtcgttctcacctccagtttccaagagataaaccatttatcagcctgtttacttatggtgacagatttcggtttatatccagtcggaagaatttcataagttttcagccaaccaatgacaggaactttaatttttctataatcaatttttattgcaccatctaaggtgaaagaatcatgtttaccctttttcttaaacttaggaaaccctttacttttcttgaagaaagatttaaaagcatctgacaaatatcttaatgagtattgaggggcgcatttagatacttcataataccaaggatgggtagatttaatggctgctactaaccatttgtgtaaatctatggctgtgggaaatttgattttgtcttgaggattaagtttattatgtaatagtacctgtcgacaaagtgctaaaccttgattccaagcgtgtctggctactcctgcgtgttgcgccagtagtagtcgttgttgcttgttaactttgagttgggttttgaatcctagtagcatacagtgattttactgtaattctgtgacaaagccaaaagatgacagaaaattttgagcaaatgtgagtatttgttagtattggttaagaaaaaagtaactagctactaaccccctgactcctgactcctgactcctgactccggttggtgagcgacttgtattgagcgcagtcgaagtaagtcgaagtaagccgaaccactgactcctgactcctgactcctgaattattacattgatcaaaattctttctggaattgacctttggagtgatgtatatatttttaggcttatggcttaattgtttaagtagtttaaatttgttcttcttcgattaagccaagactcctgaaacagtgaaacagtgagtaaaccactagcaaacaaaatcctatcatttcatttgatttcacagagcaagtagctcaggcaggaatatatggatcattactcctttttaacttctaatacacagaacaatccactatacaaaggcaatcatcaaaatactgcgtatacacaaaaaactggcgtaaaaactagcagtaaatctttaccagaggacagctacttaaggtcttatgctttaaagttagctcaccaaggggattacacagaggcgatcgctttgttaaaccaattgattgatagtcatcctaacaatgcaattgattataacaatcgagggctaatttattttcaaagtggtgaatgccaaaaagctctaagtgactacaatacagcaatgcagctaaatcctaagttagcaagtgtttataataatagagctaattgctatgctgcttgtggcgagttcattgccgcactagctgactatgatcaggctttagatttaaatccgcgttatgttcgtgcttggattaaccgtggtattactttgcgtgatttaggagaatatcaggaagcaattgataattttgagattgcattgttgtttggtcagctacaaggtaatatttgggctgaacgtggtaggacttatcatatttggggtgactggaattgtgcgatcgctgattattaccgcgccctcacatatatcaactgtttagacaccaatgaggatgtttctggttatcggttgcgcttacaactggaaaattggttagatgaattgcttcttccccaaaagactgattggtaaatttttcacattaaatcagattaaattcaaaattcaaaaaatttcaattttttgctttctcaaattttaattttttgttttaattttttggtagcgcccctgcatctttgattggctaatagatgataactatcaaactcttcacgaattagctattgactattagcttctgttattaatagaaattcatttcttgtttatacacccttaaaattacaaatcatttcaatttgtctcagggtgtggaattggatcgttcagtacctttagtatctggattaatcagcaccaccggaatttgactgggagcaaatctatatgattgttcttgcctgatactattagcttggctgggatcaaaattgcggctaaattccgtcctcaaatcatcaacacgtccttgcatgagcttgacttctgtgcggatttctcgcaacttatcttgttgtaaccagtgataaggcataagctgagatagagcagataccgctgctgtgataataaccaagttaacggtgatcttggcagaagtttctagcgccatgatttgataagaacgttggtgaagatgtttttttggtctaggagcagttcggttgggtttaactggtggttgtagcggtggtttggatggttgaaaggcgttcataacaataaaaatagtcaggctgattgaagggaagcaccattaaaagtaaaatggagctaattgcgactgaatttagctgccatattacttcatttttggcaattttctacaagtattaggtcataaaaaaaaatacctggcatacgcaggtacattttttcaagatacttttggctaaaagtctcaagatcctgaagattttaccttgtatggccaggttgatttagtcttgtgtgggtgtcacatctgggagttacttgtaaagttcagtcgccaaacgccaagcgagaatgcctggaattaaagctacaactagagcgatgtacacttgagtatctgagatagtcatggtggaaactctcctaaaattccaatgagatgattaacatttcttttactacttttccttgttttgccaaaattggggaatatcttgttacaagatgcaacaaaaacatgattgattggtgattggtgattggtgattgggaaaaatacaaataacttccccctgctccttactagaaagctcccctgcttcttccccagtcaccagtcaccagtccctattccctattccctattccccgttatgactttctacttgggtattgattttggtacatctggcgcacgagcgatagtgattgatgaagaggctagaattgtctctcaaatgcgttatccttgggcaaatgtgacaaattgggtaaattgctggaaagacgctttatggggtcttatagagggaatttcccaggaatggcggcgtgaaattggggcgatcgctattaacggtacttcttctacaatcttgctgactgatgctgctggccagcctgtagatgctcccttattgtacaacgatccacggggatcaatgatgctcaaggatttgagtagtattgctccacctaaccacacggtactgagtgctacttctagcctggcaaaactgctgtggatgcaacaattacctacgtttaatcaagctagatatttattacatcaagctgattggttggcatttctcttacatggaaaattaggtattagcgattatcacaacgctttaaaattgggttatgacgtggaaaatttgcaatatccagaatggctagaaaaagtagaaattcctgtgtttttacctcaagttttagcacctggtactcccattagtgaaataactccagaaattgcggctaaatttggttttaggcgtgattgcttggtgtgtacaggaacaacagatagtattgcggcttttttagctagtggagcaaaattaccaggggaagcggtaacttctttgggttcaaccttggtgttgaaacttttgagtcgtacccgtgtagaagatgcacgatatggaatttacagccaccgtttaggagatttatggttaactggaggagcttctaatactggtggtgctgtattaaaacactttttcactgatgatgacttagttcgcttgagtcaagaaattgatgtatcacaagccagtgagttagattattatcctttgttgaaagaaggcgatcgctttcccattaatgatccccatctacccccaagactagaacctagaccagatgatcccaaagaatttttacatggtttgttatcaagtatggcgcgaatagaagcaagaggatatgaattattgcaacaactgggagcagataaattaagctatgtttatacggctggtggtggtgcggctaattctacttggacggctattagagctaaatatttaaaagtacctgtagttgcatctaataacaccgaagctgcttatggaagtgcgcttttggcgatgcggtgatcaaaaataggtgattggtgattggtgattggggagaaatatttacctcctgcctcctgactgcttacattttcactttttgttgacaactaacttctaaagggaggaaaatggttaaaacttccccatatttgggattttgacgtacaatcaacttaccaccaatagcttgaaatagatgtttagtagcagaaatatttaaactaatagttcctgtttccggctggaatactaataattgacctaaagatttacgaattggtagtgttattgttctagttgtatcttgacaatctaattgaggtgataattgtaatttgagttgatcaccggcaggaataacttgaacttgaatagaactaccggggggtaaactgcgggtgaaattttccattaaaccggtgagtacccgatctagcatagcgggattactgacaacagttggtaattgctgaggtaaagccacatctaaagttaaattccgtcgagttgctgcttgttgccaacgggggatactttgctgtaaaacttgatccaaagacattggcgttaattgggtattgccagattttgctgttgtacaagtttctaattctgcggctttaaataacaactccatccgatcaatttgttcagtacattcgtgatcaataacttgcaaacgattaattacagtagttggtaaatcttgccgcttgagtagcaaccgagtcatagtacgaatagttgccagtggggtgcggacttcatgggcaaaagcttgtagtaattccacatcagaacgggaagatggttttgctgatggggaaagatgactgtgggtaggtggagagatgggaatagtatgtgttggtttatccgtttctggttctgctaattcctgaagcaaaaactgggtaaattgaattatagtttgatagtttggtgcagttgccggatatttttggactaaagcatccaaatcggcaaataattcgggattagtcaaaaccacccttgcgcctaaaacttgccaagcttgctgtactacttctggtgcaaaagaaaataaaaattctttgttcccgctgctgtttgctgataacactaaaaccaatctaaaattttctgtgaacaccaagcaaaactgctctgctcctagaggatcggcaggtaataagggtaaaattgattcttctggacagatatgattatatttgtaagcatagtctgtaatttgctgcggatcttcccaaggggatatatcctcattttcttgactttgggcgatcgcaccggaaacttgaaacggcatcaaagccaaagggttaaagggttgggcagtaaaagtaaccgtttttaaacttttagttaattttggctgactaaataagggtgctggtgctgttaaaactaaaccttgagttaaaccttgggttaaaccttgagtgatgtcagatgtcgtagttgccaaggtattgaggaggagatgttctgtagctgctaaactgatgcgccattgctgctctgctttagcagatgaacactcagccttatttgatcggcttgcggctaaaacttctctcaaacttggcaaaatccattcgtacacaggttttcacctctcgattaacgagtatctaaaatctaattgacgagcatctcacagcagctaaagtagacactgcactatatacttatgaggttatagtcttttctgcattagtgatagtagtagaaccgaacaattgagtaggaatttccctggcgatgatggctatcttgatgaaaatcaagctgggataaaaccttgacaggatatgattacaactttccttgtttgttgacttaatctagcggcattcgcaacatattgttacaatatttaacagcgtttatcttactggtggctttttgatgatggttaagagtcttccccctagttctcgttctaccgtggaggacagtcgcggaagcgaattgtccttaattgaagtaataccagaaaatagtacagaagtcttagtgatcaattcaccaaaattctcagcaaagcataagcagacagtattggctgaaaatgaacctgagacactgcgttatgatcctgaagagattcaagcacattaccaaagccaaactttacaggttctggggcggattttaacagttttacgacctacgttgtcatatcttttcgggatttggtgggataagcaacggggaattgtggtgaaaaatgatcgtcgtcgggcagttcaactgcgagaattattaacaaaattaggtcctgcttatattaaaattggacaggctttgtctaccagaccggatttagttcctcctatatatttggaagaattaactaaattacaagatcaattaccatcgtttcctaatgaaatagcttaccagtttattgaggaagaattaggaagtcgtccagaggagatttacgcggaactttcagcagaaccaattgctgctgcgtctttgggacaagtttataaaggtaaactcaaaactggcgaagaggtagcaattaaagtccagcgtccagatttgcgagaaagaattaccattgatttgtacattttacgcaagttagctggatgggtgcaaaaaaatgtaaaacgggttagaagtgatttagttgggattttggatgaattgggcgatcgcatttttgaagaaatggactatatccatgaaggtgaaaatgctgaacgcttttttgaattatatggacatatcccagatatttatgtaccaaaaatttactgggaatacaccaaccgtcgcgttttaacgatggaatggattaatggtattaaattaactcaaacgagggaaattaaagaactaggaatagatgcacgttatttaattgaagtaggtgtgcagtgttccctgcgtcaattattagaacatggatttttccatgctgacccccatcctggtaatttgttagctacctttgatggtaagttagcttatcttgattttgggatgatgagcgaaattaaaccgccccaacgttatggtttaattgaagctattgttcacgttgttaaccgtgattttgatttattagcacaagattacgtcaaattagaatttctttcccaagaaacagatttaacaccgattgttcccgcttttgccaaagtttttgctaatgcccaaggtgcgagtgtcgcagaactaaacattaaaagcattactgatgatttatcagcattaatgtatgagtatcctttccgcgtacctccctattacgctttaattattcgttctttggtgacattggaagggattgctatttatatagatccgaatttcaaagttctcagtgaagcttatccttatgtttctaaacgactgttaacagatccagctgatgaattaagaacttcattgaaagatttattatttaaagatggtaaatttcggtggaatcgtttagaaaacttgttaaaaaatgcccgtaatagtcaagattacgactttaatttaatcatgaatcagagtgtagaatttctctcttctgaacgcggtgtatttattcgtgataggttagtagatgagtttgtgaatgggctggatgcggtaagtaaaaacgttttacataattttacttttttactccgagaaagggtaggtttaacagcagttaatgaaatgcctggtgcaagtgttgaacaacaacaaactttagaacatattaaacgaattttaggaattctccgagaaacgagaggttttgatcctgctaaacttgctccccaagtagcgcaggtactttttaatccaagagtacattatttaggacaacaaattgctaatcgttttacgcaaaaagccgtagctaggttaattcggcaattattagcagaagaggaaattgggtgattggtgattggtgattggtgattgggaatcatataattaattacccattatcaattatcaattacccattatcaattatcaattaccctcttgatgtccattgtggtcacgttgaatactttcttgtagggcttgaatttgttcacgacgggcttctaattccaaagtgcgacgggctaaatcttgattttgcaaggttaaagattgtcgccactgttccgctttttctgcttcctgttgtaaaaattctggggtaataccagttttgaggtaagtttgcactaaataaagtacccaactggtagcatcttcaattgttgctatttcacctgtaggagaaagttcgactaataccagcactttttcgttcatgatgcttccttttgccagaagaatacaagtatcttcagaaagaatagaccataaatattcagattcctgacgtgctaataggcgtaattgatattgccctaaaaaatcatttttacatatttgagctagatacaacatagtaattcaaaattgaggaatagggaatagggaatagggaatagggaatagggaatagggaatagggaacagggaacaggaaaaaataattactgtcacctgtcacctgtcacctgttataaagtacgcagacgttcctgcaaaatttccgcttgtttttgtgcttctgctaaagcatctctggtagtttgtaccacatctgcgggagctttatctacaaagttggaattactcaatcttccagttaaagctttaacttccgcttcaactttattcaaacttttctctaatttcgcccgcaatacttcaacatcaactactccagttaagggaataacaatttgcacagtacccacaactccggaaatagaattttctttttcctgtgcaggttctttttcttcttcctgtgtggtagcaggttctatttctgtttctgtttgtgtttccttcgctgggaaatatttagcaaataattcttttctggctttaccattgagtagataacggactacaaaccaacctgcataaaataaacccactgtttcaaagaaactaccaaaaatgggtatccgtaaagatgtattgccgacaaaaataacgactctgagagtaactaacaccgccagaattaaaccaatatttttcaaagtccgccaataggaactactgaaaagttctttatttttgggtaattctgttgttgcttctgttggtgatcctgttggtgcttctccagtattttctggagtgctttctagggaattgggagcattaatagttaatgtttctaccttggctaaatctttgatatatgcttccgcaattgtcagaattgacctttctttttcactttcactttgcaaatttgcggtaatttttgcccctggtttaacatcagcttccgcccgtaaattacggatagtgcggatagtattaattaacaaatcaaattgttcttctaagctagaatcaattaaatttgtatccgcttctggataagcttgtaaagctaaaacttggggattttcggctggttgttgggtgagagtttgccaaatttcttcggtaatatggggcatgaaaggatgtaataactttaataccccttccaaaacgtaggcgataatttgttgggcaattttccgagatgcgggatctgcatctttttgtaatctggattttactaattcaatataccagtcacaaaaatctccccaaataaactcataaagtcctttggctgcttcccctaaaccataattatcaatgtagttatttgtttgtttaactacttgatgataacgggaaagaatccatttatcactgagttctatgggttctggtttacctaattgggctggagtttgtccatccaaattcatcatgacaaatcgggcagcattccagattttattagcaaaatttcgagatgcttctacagagatagattcatcttttttgcggtcatattctaagcgaatatcttgacctgcaccgactacttctttaactaatgtataacgcagggcatcagttccatatttatcaatcaacaataatgggtcaatgccattgtttgctgatttggacattttcttattattttcatccctcactaaaccgtgaatataaacggttttgaagggcatttttccggtaaaatgtcctgccattaaggtcattcttgctacccagaaaaagatgatatcaaatcctgtaactagggtagcgttggggtagtaggtttctaagtctttggtttgttctggccatcctaatgtggagaaaggccataaaccggaggaaaaccaggtgtctaaaacgtcggggtcttgttctagtttgacttcttcgccaaattgggctttagctttttctaatgcttcatctgcggttttagcaacaaagaagggtgtggtgtcggtaatttctccgccggtttcgctaactgcataccaagcgggtatttgatgaccccaccataattgacgggaaatacaccagtcacgcagatttactaaccaatcacggtaaacctttctccagcgttcggggacaaattcgggggagttttgattgtctagaaaatctagggttttgtcagcgatggggcgaattttgacaaaccactgggttgaaagtaggggttctacggggacttttccgcgatcgctatagggtactgtatgtttatagtcttctattttgaccagtacaccgtcggcttctaaacgagcaactacattttttctagcaacaaagcggtcttgtccttggaactctcccgcattttcgttaagcgtgccgtctttgttcatgatattgataaacggcaaatcatgacgcttacccatttcaaagtcgttagggtcatgggcaggagtgactttaacgcatcctgtaccgaaagcggggtcaactaattcatcaccaataatcggtatttcccgattcatgatgggtaaggtgagagttttaccaattaaatttttataccgttcatcttccgggttaaccgcaactgccgtatcacctaacatggtttcgggtcttgtggtggcgacttctacaaaaccagaaccatcgctgagaggataacggaagtgccaaagattaccatttacctctttgggttcgacttccaaatcagacaccgcagactgagaagcgggacaccagttaactaagtaattactccggtaaattagaccttcttcataaagacggataaatgcttctaaaacagcttttgataaaccttcatctagggtgaagcgttcccgcgaccagtccacggaaacacccaaacggcgtaattgattgacaattgtaccacctgattcagctttccattgccaagcccgttctaagaatttttccctacctaagtcgtagcgagttttaccttctgctttgagttgtttttccagaatggtttgtactgctatacttgcgtggtcagtaccaggtagccaaagagcgtttttacccttcattctttgatagcgaatgatggcatcaatcaacgcactttcaaatgcgtgacccatgtgtaaactgccggtgacgtttgggggcggaataacaatacagtagggttcaccggggtggttggggtctgctttgtagacttggttttcttcccagaatttttgccatttcgcttctgtggagaatgattcgtaaacactggggagatttggtatagttgcggtcatgctgggaattatcagttttttaggactctgatcaattttgccataaggtagcatggatggtgatttgttacgaaccgcaaagttcgcaaagttcgcaaagttggaatattcgtaagttttggcaatgtgagatgatgcggtttgtggtctgttggttttattgccacagtaagtatatcaaaaacatgatagaatattattgaataataagagtgaaaaatatgaacaaagaagcaattcaaaaactcagaaacataatggatgaaaccagtaaagaagcactagctaaaggcttaactcctgaaattttagaatctattttacaagatgatgaataaacaccgttttattggtgatacacggtaagctactgataaaatatcaatttttattctaactgtttcaatagctgagatactaacaacacaggtatgactgaattagaaaaacctttgatatcacgagtaacaattgcatctaaactttgatcaactgcacagtaaatttgaactgcatcttcaaagtctgttaacccagatgtaaaagctgcttctaaaatagcccggttaacaggagaaataaccataatatctaatatgtttgaaatcgcttgtctagcaagttgaagactttgggtttgtctacgagcaatgtagaaaatatctgttagtgttgttgcagtgacatatccgattaattgcccagaagcaattgcttgaaatagcatttctgcatcttgtaaaaacggctctctttctaagaagtaatctagaataatgttagtagttagtatcaatgagaattttcactacagatacttctcctctttatgttctgctaacattgctttaacttgttcatcatttggtgctggttgattggtttttagtaaacctttcatttgtttgataatgcgagttttttctgactgttggttaggttgattttgcaaggattcgataattgcgcgaacgagttctaggcgatcgctctccgataatttacaggctttatctttcagttcttgtagagacatagagggtattttactacgatttaggtttgttctcaaattcaagttttgaacgatagaaagaaacatcaaattccataaagaaattagtttgtcccaaaattaagggtgcatttggtttactcacccatgcaaaagccaaattaactgagggaaattcacctatttcagcagtagcaaaaaatggcatagctgcttgactgagattacctgctaattggataattgcctttctactatcccagattccacctaactgaagccctatttcatagggtaaaacgttgatagtagcaccactatctactaaacctaaaacttctattatttgatcacctttacgtacaattaagggaagtctgggtaaactatcaaattcattttgactgggatctgttgttgaatatttaaaccgcataaactttaatcattagcaatagattgatttagttcttccatgaggatttttccagcaccgaagctgttatcaggagttgctaggtaatatgttttgaatggttctaagggagaaatatcttctgtagagtctaactcttctgcaagaatgcgaattaatttaagtttttcggatgctgaaagttgttgaattgatggtagtaattcggttagtgtcatattttgcttgtggtgagatttatcctattgtattgtagctggtttatcgaaaagtaatacatttagtatgatttggcgatcgcacttaccaaaatcacatcacaagcgatcgcacaaaaactaatttttcaggttacttatttagtatcattttctttttctatatttaaatacgtttttgacctgtaatctaaagctctataatacatttcagtaaagtattctgctaattttcgattatattttttgtgatcattaataattgcttgtaaatcactatcacccaaaaaatttttaaaaaataaccaacctaataagtggggagtagtttgtactaatctagtatccataacttcactagccagttttctagcaccttgatcatctgttaagaaagcttggtttgttttcttggcaaatacaatggaagctaactctcctttccctagtcgtttccgtttttcaagaattgaaacttcttgtaagtcttcaagttctagattgtagttcttaacttttccatcttcagttgcttttcggaaaatcttttgtagttcacgtgcttctggtgtaggattttttcttggattatgcaaacactcataatatacaaagctagtacaacagaaatgacatcctgcggattgagcagctacgtaaagaagttgggatgagaaaatattatcaatagcacatgaatcaacaacatttagtttttgaaattcagatggattaatcgccatattttaaagtttgtccgtaaatatttgcaatattttgtaattcatattcatcaactaaaagcatttctgctaatctacctgctgatatgaacttttgataataagcatcaaagcatagttttacataaaaagttgatagacctctttttagtaattcttctttacgctgtctagatcctgttgataaatcttcgggtaattctggatcaactttcatatatgatggtactatgaccgattttacttgtgcttcatcagatattagattagcactcttcaacgcataagctaaggcttgtgtgctaacctttaatttacttgcccactcaatagccttatcaggattccaacttgtagaatctggaatgttgcttaggaactctggaggcatcagataacgagatgcaaatgtatttgctctaacttcaacaagagtttttttatctgaatcaagggaaagaacaaaatctttttcttcatctaaaattgcatgagcagattcatgtgctaccgtaaatctttgtctataaatatcttcactgtaattaactagcacacacttaccagctacaggatgtttaatatatagaccagaaatatttgagttgcctaattcacgacggaaaatatgaaatcctaaacggcgaaagtcatcataaatattactgcttacttgattcacagaatatcctaaatgctctcgtagcttttttgctgcttgttccccatgatctatgaagtattttccttgcggaataaagctaaatggtttgtagtctctcctgaaaattaaacttaataaaaaatcttcacactcgcacagaaaaagaaattcttgcacagcccaacggtcttcttttgagaactcatcaccatgctttctaaataaaatttcagtttgctcaaaaggtgctagtttttcatttgatataaagaactggtaatcacatttataataatctgctaatatcaaaacctcatcacctgttggttttttctccccattttcaagagcagttaaagattgtattgaaataccagttgatactgaaatttcatctagtgaattttcaaactgcgctctgtattttttcaattttgaactgaatagggcaagatcaaatgtcatacaactaattccccataacgcaattctctaaatcaattaaagcatcagtatcaaaaaataattcagcagtttgggaaatatcctcaaactgccaaaacaccattttatactaaacttcccgattccgcaatctttctaacaactcctcacgggataaactacccaaagacaaaagcaactgagtgcgttcagcaataggaaacttagcaatcttttccaccgcatcagataactcagcatctaaactaccaaaccgcccttccaacaaagaagttatcaataaaagttgtccttcctgtcttccttcctgtcttccttcttgctttgcttcttgtctccattcttcccgttgttgtaaataagctggtgataagttcataatctcttcctcctcttctctacttaaattatctctcaattctaaattcttgcgccagtcggctaaaatttctaacaaattctccctaaaagggttgttttcaggtaaagtcgttaactcctctactgctcttttttgtgttcctcctttccctaaaactcttaaccataaagtatcctcattttctggtaattgatgaatcacaactattgctgttttcaaaatatcatgcagaaaataaatacccttaacccaatcttctcctatctcatttgcacctaatcctttaatcatgcgaggtgagaaagttggtgttaaaatccataacatcggaaattctgattcagcaatattttggttttctcgtttcgccctcctgacaatatcgccatgaacagcatataatttgagtaaacaactgcgaatttctatttctgatggtgggttacgaaaaacctcaattaaacattgagttttggcgattttacctaataaacccaaaggtaaattttcctgagtgggtgtaggaaagggttcaaaccaaacatcaatttcttgaacttcgcttttcaccttttcgctttttttgattattcctacaggtgttaataattcctctaggtattctttagcaaattgatcgtgagtttgtcgagtcatttgatgatattgaaaatcacatttttccaaaaatcacactaaacatgaaaaatattgtataataatcatgttactataaagttatacttttaatagtagttaaccccaagaagtaaaacaaatgttacaatcaatcgaaggcatttatcaagacggaaaaattgagctaaccgaaatgccaaccggcatcaaaacagcgcgagtaattgtaacttttattgatgcaaatgcttctgtagatttgtcatctcgtgggattaatgaagaacaagctgcaaatttaagagctagattgcaatgttttgcagaagattgggaacaaccagaaatggaagcttacgatgccttataatcgtggtcaagtagtgctggttttgttcccagactcaaacttaaaaactgctaaacgtcgtcctgctttagtggttcaatctaataatatttgtactggtttatcgcaaactattatagctatgattactagcaatgtttcccgtgctggacaccctagcagagtttttgtgaatatagcaacaccaccaggaaaacaaacaggattagttagcgattctgtgattatgacagataatctagcaactgttttagatacagaaattgataaagtgattggtttttactcagaaatgtctttagtagatgcagcactcagacatacattggaaatttaaaattagacatttaaaattgtgttgtgtctgccagagaatttctgcatcttgtaacaatggcaatcgctccaggtttaaaaatctctaaaatcagatgtttaccattgctgaacgatatacagttgatggtaaatttaactacttattaaaattcttattaaacaactgtttagcctgttcataaacctgaatatcaataacaactatcccattctcctgagcataattttcaatcttcttccgtgcaaaaggacgcacaaaaaaaggaatttctttgattttcgcttccgcttccgcagtccattttatttgttcactcatagatttttaggttgtgaatgatgtgacagatttcgatttatgcacagttacaaaaatacagcatttttaatgtatttcttcaatcttctttttctcttctttcttcctttgcgtctttgcgcctaccctgcgggatctcctcacggagattgcgtgagatataaaaatctggttcacgaaaatcactataatatcgttaccaggtttaacccagtaacgatatttaaccagaactattttagcattgttgcgctacaggttctttagccaaaaattcttctaactcagttaaagcctcatcttcaatcttagtctgcatcggacagaacttaggaccacacatagaacaaaactcagcctttttataaacatcatcaggcaaagtttcatcatgatattccctagctcgctcaggatctaaagataactcaaattgacgattccaatcaaaattataccgcgctctagacagttcatcatcccgatctctagcaccagggcgatgtctcgcaatatccgccgcatgagcagctattttataagctattaacccattacgcacgtcttcagcattaggtaaacctaaatgttctttaggtgtcacataacataacatggcagtaccataccatcccgccattgctgcaccaatggctgaagtaatatgatcataaccaggagcaatgtctgtaactaaaggaccaagaacatagaaaggagcttctgaacactcctccatttgcttgcggacattgaactcaatttgatccataggaacgtgaccaggaccttccaccattacctgtacatcatgttcccatgctctgcgggtgagttgacctaaagttttcagttctgctaactgcgctgcgtctgttgcatcatgggtacatccaggacgcagagagtcgcctaaactgaaagtaacatcatatttcttaaaaatctcaatgatgtcattgaaatgggtgtacagggggttttgtttgcggtgcagcaacatccacttagccaaaataccgccaccacgggaaacaatacctgtgagacgagttttcactaaaggtaaatgttctatcaacaaacccgcgtggatggtttgatagtctaccccttgttgagcgtgtttttcgatgatgtgcagaaagtcgtcagcggtgaagttttccattctgccatggacgctttctaaagcttggtacactggaacagtaccgataggaacaggtgaagctttgataatagcggtacgaatttcatctaaattaccaccacctgtggacaagtccatcacggtatcagcaccgtatttgatagataatcttaatttttccaattcttcttgaacatcggaagaattaggagatgcaccaatattggcattgactttacatttagaagcgatacctatagccatcggttctaggttagtgtgattaatattcgcaggtatcaccattcttccccgtgctacttcttcgcggatcagttcaggaggaaggttttccaccttagcgacgtggtacatttcctcagtaattacaccttggcgagcgtagtgcatttgtgtaacattaccctgtccacgtcgcttggctatccattcagttcgcatacaataatcctcaatatacagcttccctacgctggtattacccagtctcaggtgttaagggtttgatctcagcttggctttcacaagcacccctagcatcaatggaattttagcattttaatgatcagcaaggggagggggttaatattttttggtattttggtattttggtgtgtgaaagtgcaatattcctcaatttggatgaaaataggtataaatttcctgtgctaatctcggtccaattcccgaaacttctgttaattgttgtggtgtagcttgacggatataatcaacggagcgaaaatgagctagtagtaacttttgtcgatggtgtcctaaaccgggaatttcatctaagcgcgaccttttcaatttatcacttctttgttgtcgatgaaaactcacagcaaaccgatgtgcttcatctcgcaaccttcgcaataattgtactcctggttgttctgcatctgtttctaaaggtaaagactcaccgggtaaaaagatttcttcccgtttttttgctaaactcacaacacgcaagtctgctaataaattcatttcttctaaaatagatactaccgcagataattgacctttaccaccatcaatcataattaaatctggccagtcagaatttcctaatcttggtaattttggatcttcaatatatttcctaaatcttctgtgaatcacttctgctaaactggcaaaatcatcagaatgtccaatactcacattgggatttttaattttataatgacggtaatattgttttgctggtaaaccatcaataaataccacttgagaagctactgcattacttccttgaatatgagaaatatcataaccttcaatgcggtgaggtaagtctggtaaatcaagaattgctgctaaatcttctaaggatttttgattactattacccaatttttgcattctttgtaattcaaattgggcgtttttttctaccatttctattaattctgcttttgtttgtcgcaaaggtgcaataatatttacttttctgccttttctttgtgttaaaatttctgctaaaatttccccatcgggtaattcatgttgtactaaaatttcactaggaatttctacactatctgctgtttgataatgttcttctaatactctttgtaaaattgctcctggttcagcttgggagttagcaataaacgctaatcttccgactaattgacctgcacgaatttgaaataattgaatgtatgcgtgttgattatctgcggctaaagcaatggcatctcttgatactgtatcatcaggtaaggatactttttgctgtgcagttaaggattttaaaccaataatttgatctctgattttagctgcggtttcaaaattcaattcttccgctgctgcttccatttgtgttgttaaaatatctattaattcctgagttcttccttgaaataccattgctattttttggataattgtccggtattcttcaggagaaattaactgttgacaaactccaggacaacgaccaatatcataatttaaacaaggacgatctttaaataaaggttggggtctttgtttttggggaaaaatgcgtttacacaggtgcagaatttcccgtaataaacctgagtctgtgtaaggtccgtagtatttatcttttttatctttgggttttcccagttgacgtttacgagtaataaaaatgcgcggatactcctcggaccaggtaatgcagagataaggatattttttatcgtcttttaataaaacattaaaataaggttgatgctgtttgattaaatttgcttctaatgctaatgcttccgcttcggtatcagtgacaataaattcaatttccgtcactaatttaaccatcgtgttaatgcgttgagtcttattagtgtagtcacggaaataggaacgaacacgcgatcgcaatttgcgagatttacctatataaataatgcgatcgctttcatcccgcattaaataaacccctggtgctgggggaatttctgctaaacgggtttctagttcctctggttttttaactaagggtagagtttgggatgatactgtcacggctaatgttaggtaattttacaaataaatacctctctttattttaagaaatatttttaatgtcatctaatttttgatgaagatgcgatgaattatataacgaaccgcaaaggacgcaaagcacacaaagaaagccagaaaaccagggaataaattccctgtcttatagctaaagtcagttaaaaccgactattttgcaaagattatggtttctcaaacgctagaattaataaattcagcaattctatctaccgcagtttctaatatctgtggttcttgcaccaacgcaaaacgcacatatccttcccctgctgaaccaaaaccagcacccggagaagcagctacaccagtttgtttaactaactctgtacaaaatttgatagaattattactccaaggttctggtaattttgcccaaatatacatagttgcttctggtgtgggaacgttccaaccaatgcggtgtaaggcattgatgaaagcatcacgacgttggcggaaaatagcaactgatttttttacaccgtcttgattgcctgtaagtgcagcgatcgccccgtttaaaattcccaaatattgattaaaatcaacggtggctttaacctgttttaaagcttgaattaattgagcgttaccaatggcgtaaccaatgcggaaaccacccatattataagatttagacaaggtgaaaaattcaatagaaacgcttttttcagggtcagcttgtaaaattgagggaactgaggattttagattttggattttggattttggattgaaagtttcgtcctgggtaaatactaaatctacgtaggggaaatcatggactaaaacaatgttatgctttttacaaaaagctacagcttcttgaaagaaagataaaggagcgatcgcactggtaggattatggggatagcttaacaccatcagccgtgactgagctaaaactgaagcgggaatatcagtcaacactggtaaaaaattattttctgcctttaagggcattgggtaaatttgcccacttgctaaataaactcctcctgcatgggaaggataaccagggtctaataacaacgcaaaatcaccaggattgagaattgctaaaggtaaatgtgcagttccttcctgagaaccaatcaaaggtaaaacttctgtttctgggtcaactttaataccaaatttttgctcataccattgagcagcagcttgacgaaatccttgagttcctcgaaacagcaaataaccgtgagtgctaggatcatcaagagatttggcgatcgcatcaataatatgattatctactggtaaatcagaagaccccagagacaaatcaattaatttttttccagcagacacagctagagccttagccctgtccatatccgcaaatacattagcttgtagaggttgtaaacgttgtgcaaattgcattttagtcattagtcatgggtcattaagctgttgtgcatttaatttgtataagtggaacaggcatcttgcctgttaaacaagagttcagaatattaggattatacaatttagctgtgtaacagcttagtaattagtcattagtaattagtcattgggcaaaatcaagtcaaaagtcaaaagtcaaaaaatagggaacaggaaagaggaaagggagcaaggaggaaaatagctctcttctgcctccagtccccagtccccagtacctgaccatttactaattactatttaaatgctgatccaaaagactgagtaattgatctttgctgataactccctcagtcgattctagcagttgcttttctttaattaacctgagtgcagggacaccttccacctgataccgttttacagttagggggttagggtcaatttccatcttgacaatttttaggcgatcgctgtatttattagcagctaaactaatcattggcgacatcaattgacaaggaccacaccaggaagcccaaaagtaaactaatacaggctgctcggcttttaaaacctcagtttcaaactcagcgtcagtgatagttattacacccttactcattaaagtctccattaggtggcatcttccaagttgacacacacattactgtatcgtaaaaaggagtcaggagtcaggagtcaagagtcaggagttatttattttggattttggattttggattttggattgtttttgttaactccaatctaaaatctaaaatctaaaatctaaaatctaaaattttctttcccagtcaccagtccccaacgaaacaaaatcccacaaccttgaggtgtgggatattctcaaatgtgttttctgcaaaacttacaactgatctaattgtctctttaaagcttccaactcagaatcaaccggttctgctgatttggctgtggtggttgtttgttgtgtattggtgggttgtttttgtgggggtagttgcggttgaggtgctgctggtgatagcatacttgctttcaaagctgccaattcatcatcaacatcactactaccttctaactgggcaaattggctttctaaagttccacctactaattctgctgtagactgagcgcgagcttcttgcatcaaaaccttttcttgcatgcgctcaaaagcagccatagcactgcttgtactcatcccactaaccattgaacccagttgttcctgagctttagcagcagtaattcgcgctttgagcatttctttcttggttttagcttcagaaattttgctctctagctggattaaattctttttcagagtttccacctgtacagtttgctgatctaaactgacttttaatactgtagcagtatcattaaaagttttcttgcgctctaatgcttgacgggctaagttttcatcacctttttgcagagctagttgggcgttacgttgccatttattaacttcatttacagcatcattgtgttgtttatctgtgcgcttttgggcagcaattgcttgtgcaaccccttgacgtaactgtactaagtcttcctgcatttccaacagggcttgttccagcattttttctggatcttctgctttattgattaaatcgttaacattcgcactaactactcttttaagccgatcaaataatcccataactttgtttttccttgtttttctgcttgaggtttacgcgcttggttagacagtgaacttttttactgtttaatagctacctatttcaatttaatctttttagtcgggaatggtatttttacaatactctctccattctggatcatgacaatataattcagctacattaactcatcagattcaacatttagtagttttcgttacttgatgtactgcaaatctatatctcaagctatatttgttgctgctggttatttacctcctttaacatttgggttttcattgctgccagttcaacatcgacattattattaatagaattcaacttagcaaatcctgtttccagattgtcaccacccaattgaccaattgcttctgcttgtgattctatctgcaacaccttatcttccatccgttctaatgcacctagactagatgtagtagaaaattcactcagcatttcctgaagtttataggaagcttgagcagaacgagcgcgagcaatgtacatatcttttttagtttttacttctgcggttttcaactccaaactacgcatatcctgttttaacttctctacaacttgtttttgctgttctatttgctcaaacaaagctgtagctgtttgttggtaagtttggcgtttggtgagagcttcccgtgctaaagcttcgttaccttgttggagagctagttgagcgcgacgataccattcttgggattgagattctgctgcaagtgcttgacgttcagtgcgtttttgggtagcgatcgcaccagcaactccctgtctcaattgtaccaaatttgactgcatttccagaaaggtttgctccaaaacttttt

SEQ ID NO: 55 - DNA, 35476 bp, Sphaerospermopsis sp. LEGE 00249
  LEGE00249_70
cccctgccccctgctccctgcctcctgcctcctgcctcctggatatcctgcgagaacaactgaagataaggcataatggttaaaacatagttcaaatacaaattcaaattctcgaaaaatcagccataagggctgtaaacctctgtcccacttattgttaaatatttttgtatgcttgtatcgcagtcgggaaattatccaatcagtagcttgagtcccatcagtattagctgtaactacaacagcccaaacaacattgtaccgatggtggtagaacagtccggtatgggagaaagggcttttgacatctactcccgtctattgcgagagcggattatttttttaggaacgccaatagatgacactgtagctaattctatagttgctcaattgctattcctagacgctgaagacccagaaaaagatattcaactttacataaattcaccagggggatctgtttacgcaggaatggcaatttatgatacaattcaacaaatacgtcctgatgttgttaccatttgttttggtctagctgccagcatgggggcgtttttgttaactgcgggaacagcagggaagcgtatgtctttacctgactcccggattatgattcaccaaccccttggtggcgctcaaggacaagcaattgatattgaaattcaagcgcgggaaattctttacattaagggcaagttgaatcaattaatgtccacgcacactggtcaacctttagaaaggatcgaagctgatacagaacgcgacttttttatgtcagcagaagaggcaaaagactacggtttaatcgatcaggttatttctagacaaaatctccccacagcaggggcaaacgtcaccattctgaaataagaggcttggtatgtctaaatacgactcccatttaaaatgttcattttgtggcaagtctcaggagcaggtgcgtaaattaatcgcgggtccgggagtctacatctgcgatgaatgcgttgacttgtgtaatgaaatcctagatgaagaactgctggataccagtaatgctgcttcccaaccagcatcacgttcagaacaacctcaaaaacgccgtaccagttctgccaatctctcttttaaccaaatccccaaaccgagagaaattaaaaaatatttagatgaacacgtaattggacaagatgaagcaaaaaaagtcttgtcggttgcagtttacaatcactacaagcgtttagctattgctcagtctaaaggtaatggtaaaggtggcgctgatgatgctgtagaactacaaaagtccaatattttattaatgggtccgactggttgcggtaaaaccctgttagcgcaaactctggccaaaatcctcgatgtaccctttgctgtggcagatgctacaactctcaccgaagcagggtatgtaggggaagatgtggaaaatatcttattgcgacttttgcaagtggcagatttggatgtggaggaagcacaacggggaattatctacattgatgaaattgataaaattgcccgcaagagtgaaaacacatccattactagagatgtttccggggaaggggtacagcaagctttactgaaaatgttagagggtacaattgctaatgtaccaccccagggcggacgcaagcatccctatcaagattgtattcagattgacactagcaacatcctgtttatctgtggtggggcttttgttggtttagaaaaagtcgtagatcagagagtgggcaaaaagtcaattggctttgtgcagtctggagaagggatatctaaagaaaaacgggttgcggacacactgcgtcatttagaaccagatgatttggtgaaatttggcatgattcccgaatttatcgggcggatgccaatggtggctgtggttgatcctctggatgaagaagcactgatggcaattttgactcaaccccggagtgctttagtgaagcagtatcaaaaactgctgaagatggataacgtccagttagattttaaaccagatgctttgaaggcgatcgcccaagaagcctaccgtcgcaaaactggggcgcgggcgttgcggggtattgtggaagaattgatgttagatgtgatgtatgagttgccatcccgtaaagatgtaactcgctgcacagtaacgcgggaaatggtagagaaacgttctactgcggaactgttggtacatccttcttcattaccaaaaccagagtcagcataattggtgattggtaattggtgattggtaattggtgattggtgattggtgattggtgattggtaattggtaattggtaattggtgattggtaattggtaattggtgattggtaattggtaattggtgattggtaattggtaattgggaaaaatacaaataatttccccctactccctgctccctgctcccctgcttcttccccagtcaccagtcaccagtccccagtcacctgtcacctgtcacctattccttaaaaattatgtcttatatcaaagttcgcggggttgagcattattacgagtggatcaagaaaccatcagatgtggtaaaaccagtgatggtttttttgcatggttgggctggttcgtgtagatattggcgcagtacggctgaggctttagcagataagtttgattgtttattatatgatatgcgcggttttgggcgttcccgtgctgaaacccaagatagcagtaaattgagttatgaattaacagaatatgcggaagatttagcagtattattaaatgagttaaatctggagcgtgtttatattaatgcccattctatgagtgcttcaattgcgactttattttttaatcgttatccccaaaaagttatcaagggaattttaacttgtagtgggatttttgaatatgatgaaaaagcctttgcagctttctataaatttggtggtttagtagttaaattccgtcctcaatggttagggaaaatacctttagcggataggatatttatggcgagatttttgcatcgtccgattcctaaagctgaaagacaagcttttttacaagattttattgacgctgattatgattccgctttagggacaatttttacctctgtgagtaaagaacaagcggaaacaatgcctttagaatttgctaaattaacagtaccaactttgttaatagccggagaatatgatttaattattcctgctgatttaggtagaaaagcggctgttttgagtgataaggtgcagctagaaattattgctaataccgcacattttccgatgttggaagatccagaaacttatttacagaaggtgcgggattttttgggtaatgggtaattggtaatgggtaatgggtaagctgttgtgcatttaatttgtataagtggaacaggcatcttgcctgttaaacaagagttcagaatattaggattatacaatttagctgtgtaacagcttaattggtgaaataaattagaggtgaggttatgagtgtagttagtaatttagagtatttacaacaactctatgaaattgatgattatgaatggttattgactaacattgaattattaaaacaacgcagatttaatgatgtggatctagagaatttgattgaggagttggagtcattggctaagcgagataaacaccaggtgaaaaatctgttagaacaaattatgagacatctgttactattaaatttttggaaagctgaatatgaaagaaataaaaatcattggcgtgcggaaattagaagttttaggacacaattaaaagatagattaactactaatttatctaattatttaagttctatttttgctgagatttatcatgatgctttgggttatgtgcaggaaaaaacaggttttactgtgagttttccttcagaatgtccttacactttagaacagtttttagatgtggattttttgggtaatgggtaattggtaattggtgaaataaatcagaggtgaggttatgagtgtaattagtaatttagagtatttacaacaactctatgaaattgatgattatgaatggttgttaactaatattgaattattaaaacaaggtagatttaatgatgtggacttaaataatttaattgaggagttggcagatttgggtaatgaaaagaaaaatgcggtcaagagtttattagaacaagttattagacatcttttattactgcaatattggacagaagaaatagaaaataatggtcatcattggcaatcagaaattttaagttttcgttatcaactggaggatagattaactactaatttacgtaatttcctagctgatgaacttgatcatatttatcagagagcgttaaaatatgtgcaggtaaaaactaagtttcaagtagattttcctccagaatgtccttatactttagaacagttgttagatgtggattttttgggtaatgggtaatgggtaatgggtaatgggtaatgggtaatgggtaatgggtaattggtaattggtaattggtgaaataaattagaggtgatgttatgagtgtaattagtaatttggaatatttacaacaaatctataaaattgatgattatgaatggttgttaactaatattgaattattgaaacaaggtaaatttaatgatgtggatttagagaatttaattgaggagttggcagatttgggtaatgaaaagaaaaatgcggttgctagtctgttagaacaaattattagacatttattattatatcagtattggacggaagaaactgaaagaaatggtcatcattggcaagcggaaattgtcagttttagaaaccaattaaaacgacgtttaacgggtaatttacgcaattatttatctgaggaaatgttagatatttatgctgatgctttaaaatttgtggaggtgaaaactaagtttcaagtagattttcctccagaatgtccttatactttagaacagttgttagatgtggattttttggggtgattctttaaacacagataaacgcagataaacgcagataaacgcagataaacgcagatggtttaaagtaatagtttgaatatgttaataaaatgttcataaaacttaaataatcagtacataatctttgttactggtatatgctacaattgttacgacaggttagatacctgtattttctgtatatatacctggtaacaatattatgaagttcaaccgcaatcaagttaaaaaatatctgcaattatctgattttacatctttatttattgaagagttaggctgggattatgctgatatttcccctatttatttagctgtagatgaggaaaattctactttagaatatactttagaagctgttgcccaaaaacgtggtttaatagtttatcattgtgttgctgaaaatgggattttacctaatgctaaaactagaaaaaatatagatacccaagttactagttatagtcaagaacatttaattatttatactgataaaaatcaatctaaacaagtttggcaatgggtaaaaagagaatctgctactaaaactaaagctaaagaaactacttttaatgttactcaatcaggagaattattaactcaaaaattagaggcgttatttattgattttgctgaagaagaaaatttaactttaactgatgtcactcaacgcactcaaaccgcttttgatattgaaaaagttacaaaagacttttttaataagttccaagaaagacatttgcaatttgttacttttatcaaaggtatcgaaaatacaaaagatgctaattggtatgcgtcggtaattttaaaccgcttgatgtttatttatttccttcagaaaaaaggttttttggatgatggtaatactaattatttacaagataagttaaaggttagtcaaagtcaaggacaggatttatattatcaagagtttttacaaactttgttttttgatggttttgggaaagcggaaaagtttagaaacccagatacaccgtctgtaattggtaagattaaatatattaatggtggtttgtttttacctcatattattgaagaaaaatataatgttacttcgacttcgctcagtaaccgtattcaaattagtgatactgcttttgaggagatttttaaactgttttccggttatacttggcatttagatgatacaccaagtggtaaggatgatgaaattaatcctgatgttctggggtatatttttgagaagtatattaaccagaaggagttcggtgcttattatacgaaaccggaaattactaattatctttgtgaacgtactattaataaatttattgcagagaaaattggtaataataacatattacactcgttcccacgctctgcgtgggaatgcaagtcaagaggttctacctcgaaaatagaggaggtagaacctccaacagaacattcccagtctggagactgggaacgagaagaacgagaaaaagaacattcccagtctggagactgggaacgagaaaataatcaattatgtcaacaattattagatgatgttttaccaaacttatcaattttagatcccgcttgtggtagtggtgcgtttttggttgctgctttacaacatttgattaagatttataccgccatttttgattttattgaagtttctggaaatgaggaaaataaagcgagattaacgaagattaaaaaagatcatccttctttggattattatatcaaaaaacgggtaattactgacaatctctatggtgtggatatcatggaggaagcggtggaaattgctaaactacgcttgtttttaagtttggttgctgctgcgaaaactgttgatgatttagaacctttacctaatgttgattttaacattatgtctggtaattcgttaattggtttaattcgcgttgatggaagtcgttttgatacggtgggaagttctaaacaaggtaatattttacaacaattaaattctcaaaattatcaagcgattttaaaagagaaaaacgaaagtattaggaagtacaaagaacacgcttttattgttgcagatgtggaaggtacggaacaggaagataggttagaatttttaagggaaaatattaatcgtgtcaatcgggaatctttggtgaagttaaatcaattgttgttagatgaatttagcaatttaaagattaaatatgaggaggtgcagttaaagggtaaacctgtgaaacgacttttgaatattgcggatatggaagggttaaaaccttttcattggggttatcattttgatcagattattgctaagggtggttttgatattattttaggtaatcctccttgggagatttttaaacctcaagctaaggaatttttcgcagaatatagcgatattgtgagtaagaataagatggatattaagacttttgaaaaacaacaaaagcagttgttagaaaatcctgaaattgctactgcttggttagagtatcaaagtcaatatcctcatgtgagtttatattatcgaagtgcggaacaatatgttaatcagatttctgtggtgaatgggaaaaaacagggaactgatattaatttatataagttgtttgtggaacaatgtgttaatttactttctcaaaatggtgaatgtggtttggttattcctagcggtatttatactgatttgggtactaagcagttacgagaaatgttattttcgcaaactaatattactggtttattctgttttgaaaatagaaaagctatttttgagggggttgatagtcggtttaagtttatagttttgacttttgaaaatggtaagcaaactttatctttccctgctaaatttatgcgtcatgatgtgggagagttgaacagttttcctggtgatgattgtattaatatgtctgtggatttaattaaacggttatctcctgattctatttcaatcatggagtttaaaactgatttagatattttcatagctgaaaaaatgagtcgctttcctttgttgggtgaggaaattcaggataaatggaatttaaaattaactcgtgaatttgatatgactaatgatagtcatttgtttaaaactgaaccaggaaagggaagattacctttatatgaagggaaaatgattcatcaatttaatcataaatttgctgaacctcgctactgggttgatgaggaggaagcaagaaaagcggttttaggtaaaaatggtattgataaagggcaaattttagattatcaatgttatagattggggtttagggatattgcaagaaatacagatattagaacaataattgcaactatagatacttgttcatttcatggaaataaattaccaaatatcaaaatatttgatgattttggaaataaaattatagattataaaagtcaacttttagtatgttcatttttcaatagttttgtattagattggttactcagaacaaaggtttcaagtacacttaactttttctacatttatcaacttcccgtacccagattaacagaaaaagacgaatattttaatgaaatagtagaacgtgcggccaaactaatatgtaccacagcagaatatgatgaattagcgaaagaagtagggttaggaagtcataaaaacggaattacagaggagagagaaagggggaaaattcgcgcagaattagatggaataattgcccatttatatggattaacagaaagcgaatttagtcatatattgagtacatttcccattgttgcggaagaagtgaaaaatgctgctttaaatgcttatcgggagatggttaaataacgtaaacgtaggggtttagcattgctaaacccgtacaattcataataaaaacggattaacattaaaactaagatcatgcttgaaacagttctataactgacttaatttcatccattgttatatctgtttgttccagtttagaataaattaacagtaaaaggacatttgtaggtgattgaatctgataaataattcgataaccactacttttccctttttgaatatcactgttgcgaactcttaccttcaaaactgtataccctgttcctgcaatttgatcacctaaaaaattaccactttgtaattcttcaattattggttgaatatcagtacgaatatgacgatattttttgataagctgcgtattttctgtttaaaattatcagtaaactgaactattactaatggggtatcactcaacatcaataccttcccaaagttcagaaattggatgtactttacctgctttagcttcttgtaatgagattttcaaaccttctaaaacagattcttttgattcatcatcttcatctaattcatcttcaataaacaaaacaattaatttaactcggcttggtttattaactattaaaggagtttctaaagagatgttaccattttggtcaacttttgccatgatttcttgggcaatcatatttactcacctgtaattactacacacatttaattactacaaacattttaccatattatagtaaaatagtaactacactttgatcaagatccccgatgtcttgaataaatattgtgaataaatgataaattaattaggacttacgcaagatgtgactgaaaaccttattcttgcgtaggggtaattcatgtagcttgcttcccaaagggtattacccctacttttgttttcttttgcgtaattcctgttaatgatagaagtcggggatctgaaaatatgttataatcttcaaattagcaacaggagtaaaaaccatgactattaaagaattaattcaagccgaaattgacaatataccagaagatcaacttgatgagttttatcaattaattaaagaatttagagataaaaataaaaacaaaaaaaaggggatattatctaagttaaaagagataaaaattcaagcacctgaagatttttctgtaaagtacaaactaatcaaaatatccctaacttccgttttaatcttgtaaataaatgataaattaatcatagaagtcggggatataaattagtattatattatataacactacataatataacatgatattacatgatattaaaagttaattccttgcgatcgcaaaatttcctctaaatattctaccctttttcgttcttgatctgcacgttgtttttcttgatcagcacgttgtttttcaagtgctactttttcatctcctattaatagaatttgtccttgttcatcacaccatcttaaccattgatagctttttccttcaaattctccttcccaaatagttaaccctaaacctatttcttctaaccaatttgtagatattaattgataattaacaccttttaattgatagatgtaaagatttggttttcctaaataatggaagggatcaaaaaccacataataacctactctcgcttgagaataatcttttaatttagttcctaattcatttcccactttattagaaactatttccacaactatttctggagatttaccaaaattccaagtaaaataagattgatcttttttctctgaccaatcttctggtaaagtaactcctagacttaacatgatatcaggaacaagaggaagtttattagctgcataaaataaccctacattagcagtagctaaaaatggttcactaacattaaaagaactataaagagaggaaactaataaacgttgttgtttttcagaaattaaattatccactggttcactattatcaatagtcacatttgttaaatcgggaatagcaggtttttcaaaatcatcaggactaggtttacgactgctaatttctggtgtaatctgtggagttaaagattgagtcattatagaaatactcctgggagtaagggagatcatattttatataccatttaccaagttagtcgaggtacagagttttttatcttagggaattgggaattgggaaaagtaaataaattaaggtgtacctcatgagactgggaaacgctatattgattatgatatcataattatatcataaattatatcataaattatatcataaattatatcataaacatgaatctaaagatccccgacttcttaactcaatcttgtcaataaatggtaaaatggtaaattaatcatagtaagtaggttgggttgaacaaagtgaaacccaacttaaacaaagttttggtttcgttcaagtttttaattgttgggtttcgttcctcaacccaacctacaaccaattttataataaataaaaacctatgccaagaatttttgataacatcaatgaacaattattaaccaccctcaaacaaagtctcaaaaccgcccccaaagcagatttctgtgtaggttatttcaacctgcggggatggaaattaatacaggaagaaatagaacaatttaccggaggtgaaaataattgttgtcgcttattaattggaatgcaaaaattacccaaagatgaacttaaccaaatgttaggtttaggaatatctcgcaaacccatatcccaaagtgacacaactaacctgagaaaacgcctagtacaagaatttagtcaacaattaactttaggtaaacccagcaatgatgatgaatggggtttaaaaagactaaaaacccaattacaaactaaaaaagtagtagttaaattatatctccgtcatcccctccacgctaaactttatttaattccccaaaatcatcataatttacccgctattggttttttaggaagtagtaatttaaccttttctggtttatcttaccaaggagaattaaacgttgacatattagatcatgatgcaactaataaattacaaacttggtttaatgaacgttgggaagatcgattttgtttagatatttctgatgaattaatcaaaattatagatgaaagttgggcaacagaaaaactaatttctccctattatgtttatctcaaaatggcttatcatctctcccaagaagcgcgagatggtttaagtcaatatgctataccttatgattttcaattattcccttttcaagcagcagcagtaaaagttgctgcccattatgttaaccgtcgtggtggtgtaatgattggggatgtggtaggattaggaaaaaccttagtaggaacagcaattactaaaattatagaggatgaactgggtattagtaccgttattatttgtccgaaaaatcttgtttctatgtgggaaaaatataaagatgaatatggtttagctgctagggtagttcctattagtcaagttaccaaaatattaccgacaattaccgcccgttttcggttagtattaatagatgaaagtcataatttaagaaatagagatggacaacgttatgcagcgattaaagaatatattgaacaaagcggaagtcgttgtattttattaactgcaaccccttataataaaagtaatttagatttatctgcacagttacggttatttattcctgaatctaaagatttaggtattaaaccagaaaatttaatcagagaattgggaaatgaaactgaatttaaacgtaaatatccgcaaacggaagtgagaactttaacagcatttgaaaaaagcgaatatgcagaagattggcaattattaatgaatcgttatatgctcagaagaacacgcagtttcattaaaaataattatgccgaaactgatgcaatagatggcagaaaatatttacaatttcctgatggttctcgttcttattttcctacccgcattcctaaaactgccacttttactattaataatgatgatgactatgggaaattatactctagtgaagtggtagaaattatcaattctctatctttaccccgttacggtttaggaaattacactttagataaatataaacaacctcccacagcaacggaacaacaaattttaaatggtttatcccgtgggggaagacggttaatgggtttttgtcgcacgaatttatttaaaagattagaaagtagcggtaatgcttttttagaatctttagaacgtcatattttaagaaattatgtttatattcatgcgttagaaaataaattagatattcccattggtacacaggatgcggaatttttagagactgcaaataatgatgaagatgcggataatattaattctaccaatttagattttgaaatagctgatgatgacaatgatgatcagcatgatgaagaaaatgatgaggtaaattttgctagtttaagcagtaaagaagcagaatataaacgtcaagcaaaggttatttatgcactttatcaaagcaaatatgaaaaacgttttaaatggttaaattatcggttgtttaagtctgagttgaaaaaacatcttctggaagatgctagagcattgttgaagttattaaataactgtttaaataactgtttaaataactgtggagaatggaattatcaacaagatcaaaaatttcaaactttgcaaaagttactcacagaaattcatcctgatgagaaaatattgatttttactcagtttgcagatacagcgcgttatttacaggaatgtctaggaaaagcgcatatttcccaaactgctttagttacgggtaaggtaaatgatcccacatctttagtatatcgttttagtccccaaagtaatcaacagaatatcacccctgaacaacaaattagaattttaattgctacggatgttttaagtgaaggtcaaaatttacaagattgtcggattattattaattatgatttaccttgggcaattattcgcttaattcaaagagcaggaagggttgatagaataggccaaaaagcatcagaaattctctgttattcttttttacctgcggagggtgtggaaaaattaattaatttaagaggtagactaacagaaagattacaacaaaatgctagtgtagtgggtacagatgaggcattttttgaagatggtttttcctatcaagaaatactggatctttatcatgagaaatcgggtattttagatgaagtagatgatggagaagttgatttaacttcggaagcttttcaaatttggaaaaatgccatagatgctgatccaagtttagagaaaatcattaaaaatctgcccaatgtgatttattctacccgttaccatgaaggtacaaatttagatcctcaaggggtgttaatgtatctgcgaactgctgaaggtacggatgctttagcgtggataaataaggaaggaaaaagcgttactcaatcgcaaatgagaattttaagaatggcaagatgtaaccgggatacacccccagaaaaaaagcatccccaacaccatgaaattgtcgctcaaggggctgatttactattagaacagcaaaaaacatctggaggacaattaggaagctctaaaagtgccagatatcgaacttattaccggttagataattatattaaaaaaacggaagcaaaaacccctatatttacatcaggagaagattggcagactttaaaaaaagcggtagaagaaatatatcattatccgttaaaagaaacaacggtaattaaattaaatcggcagttaaaaagcggtattaatgatgaacaattagcgacaatgattatatctttaagagataataattctttgtgtattatccatcctgaagatggacaacaggaagcgcaaattatttgttctttggggttatttggtgattagttattgggcggaaaattttagattttagattttagattttagattttagattttagtaggacttacgtaagatgtgactgaaaaccttattcttgcgtaggggtaattcatgaattacccctactttcgttctcttttgcgtaagtcctgtttagattggggttgataaaaacaatccaaaatccaaaatccaaaatccaaaataaaaaactcctgccccatcacattaaacctagttctctttgcaataaattaattgattgagaaccaatgtagttttcacaacgaattagtttaggtggacgaattagatcatctgagactgtttgcattgctgcttgtgttgttaggtaactgactggatctgtacaaaatatgatttcacaacgtttaacaatggcgtttactttataagcatccttgggttgagcagtcataactaatagttcatccccccgtaaaccgtgcaggatgacttctgtagctctgagaataccaggactgaggctaactgtaccaatacagcttgatttgggaaggcttttaactacattgagttctttactatagtcatggatatctaggggaataacgcggactgcttggggtccagcgatcgcttctacttctccgataaaataacgactggtgactaatgtggctgatgtagtttgttctaagactgcggctaattcttctgttgttaccaactggacgggaatttctagggattcttctaattcatctaccattaattccccagcaccaagatcctgtaatggtactactaccaaaactctggcactacaacgcaaacgccagtcaacttccgctaaaaatagctcccgtgcttgattaagggaacaaccttgattaagtaattcatccagtgttttttggactgttttgtatgcttcggggtattgtttcagaatgggagattgtaacctaccaccaccctcatggccttgagcgcggacataaattcctgaacctgctagactttcgacaaatccttcgtcttccaattggcggtaaactttactaatagtgttacgatgtaatccagtttgtatggctaacgccctggtgctgggtaatttataactgggtggatattgaccagaggcgatcgcaaagcgaatttgattaaatagttgactggatgcggggatttcgctgtctggctgaattcggaattgaatcattaacaattctcctgatgattggtagctgcacttaactgtttgtgtgtactacctgttaaatatatgatttattttgaatttatcggatcagataattttgatgaaaattattatgacagagcaaacaatagactctacaaaagttaaactttctcaaaatgattgtcaaattgatgcttatttagcaaaaccaacatcacctggtatttacgccggaattgtagttttacaggagatttttggaattaatgagcatattcgggaggtgacagaacggattgctcaactggggtatgtggcgatcgcacctgctctttttcaacgtcaagcaccgggttttgaaacgggttatactcctgaagacatagaaatcggtagaaaatacgcctgggaacaaaccacagcttcacaactgttgagcgatattcaagccgctattaattatctcaaaactcagcccaatgtcaaaaaagagggttttggttgtattggcttttgttttggtggtcatgtcgcctacctagctgctaccctccctgatattcaagctactgcttcattttacggtgctgggatcaccacccgcacccctggaggcggtaaccctactattacccgcactccagaaatttccgggactatttacgccttttttgggatggatgatgccagtatacccaaagaacaggtaaacgaaattgaagcagcgttacaaaaacacaacatttctcatggcgtgtttcgctacgatggatctgatcatggatttttctgcgatcaccgtggtagttataatcctatagctgcggctgatgcttggcaacaagttcaacaactttttgctaacactttagggtgactggtgactggggactggtgactggggactggtgactggggactggggactggtgactggtgactggtgactaaaagaactttaccaattaccaattaccaattaccaattacccattacccattaccaatttttcataacaattaatcttcaaaaaacatgaattccgaatcaaaactttctcaaacagccaactcgtctttttcaatggacgattttgctaaagcactggaaaaacacgattaccaatttcaaaaaggacaggttgtacatggtaaggtgtttcaacttgaccatgatggtgcttatgttgatgttggtggtaagtcgtctgcttttctaccccgcgatgaggcttcgttgagagcagtaactgatttatcggaagtgttaccgatgaatgaggaactagagtttttgattatccgggaacaagatgcggaaggtcaagttactctttctcgcaagcagttggaaattcagcacatttgggaaaaattagcccaaatgcaggaaagttcccaaacagtaccagtgcgggtaatcggtgtcaataaaggtggtgttaacgttgaagttctttctctgcggggttttattccgcgatcgcatctagccgaacgtgataatttagaagcacttaaaggtcaaactctcaccgctggttttttagaagtagaccgcaataacaaaaaactgattctttcccaacgtttagcggctcgttctagcaactttagtttattagaaattggtcaattagtcgaaggcaaagttacaggtatcaagccttttggtgtatttgtagatttagatggtgttagcgccttacttcacattaaacaagtcagccaaaaatttattgactctttagaaaaagtctttcaaataggtcagcaagttaaagctgtaattattgacttagatgaaggtaaaggtcgagttgctatttctactagagtattagaaaactaccccggtgaagttgtagaaaatatggcagaagtcatgaactccgcagaagctcgtgctaacagagcagcgaataaagcagaataggtcatgggtgatgggtgatgggtgattggtgaaattatcgttaatctcctgactcccaactcccaactcccaactcccaactcccaactccttgatctccttatggataaattacctgaaagcaagtctcagctatcatcaggcggtggtttaccagtgattcaatactgggtagaacaaacattaacaccccaagggttaaaattatggcaaaccctgaatcataaaagcgcctgtttatcctgtgcgtggggtacgggtggacaaaaagggggttttgttaatgaagggggagaatatttacaacgttgtgctaaaagtgtagaggctatatcagccgaattgcaaccaggaataaaaccagaattttggcaacaatataatattaatgaattacaaaaactgacttctcaagaatgcgatcgcttaggtagattaacttatcctctgattctcagattcggatcttcccattatcaacgcattagctgggaagaagtttatcaaattgcagcacaagcttttagtataacaccagaaagaatcgctagttatagttctggacgttcatcaaatgaagctgcttatttattacaattgttaatgcgatcgctaggtagtaacaatctagccgactgttccgatttatgtcacgccccctcaacagtaggcttaaaaaaagttttcggttcaggtacatcaatggtaagtttagagaacctcaaacacagtgattgtgtagtattaataggttctaacgcaccagcaaaccaccccagattaatgaacgaattaatcaaattgcgggaaagaggtggtaaagtaattattattaacccccaaatagaaatcggtttagttaaatttgcctcccctgcatttcccatcaaatcattactcacaggtggttcagatatctcaaccttatatttacaacccattcccggtagtgatgtagccttatttgtagggttacaaaaatcattaattgagcagaatttagttaacagagaatatctgcaatcctatacaacaaactgggcagaaattgtagaatatgcaaataacacaacctgggaaaatatcacccaaacttgcggtttatcttatgaagaaatcaccgctaccgcttctttaatcggtaaatcatcaaaagtagtttttgcttgggcgatgggtgtaacccaacaagaaaacggagttgataacatattaagtatagcaaataccgccttaattacaggaaacgcgggtaaaattggatcaggaacaatgcccattagaggacattcaaacgtccaaggatttggatcaatgggtgtaactattcacttgcaagaagaaatcaaacaagcactatcaaaattattaggaaaacctctcagcgaaacacctggttatcatacccgtgatttaatagcagcagcagaaaatagtcaagtagatactctcttttgtttaggtggtaatttgtatgcagcaaaccctgatttacaacaagcaaaacaagcattatcgcaaatagaaaccatattttatgtatctaccaaacccaacttaggacattttcacggattaggaaaaacccagactttaatattaccagttttcaatcgttttgaaaatccccataaaaccacaacagaatcaggtaataattttgtgaggttaaatgatgaaggtaaaagtcatttacaaccccataattctcatttgatttccgaaatagaattgatcacagaaattgcctatcgtctacatggggaaaatccaattaattggcgaaaactacaagatactgtttatattagagaactaattgctaaaactatacctggttatcaaaaaataggagaaattgataaaaacaaagaagaatttaccattgcagggcgaatttttgcagaaccgaaatttaaaacccctgatggtaaagcccagatgtttgtaacacccttaccccaattattaacacctaaaaaatcagattttggatttgcagaaaatcagccaggaattgtattgatattaggaacagggcgaagttatggacagcataacaccgtagtttataaacaagaagataaatatagaaatatgccccatcgtcattgtattttgatgaataatttggatattaaaaaagcaggatttcacccacatcaacgagtgaaggttaaaggaaatgggggagaattagaggatatagaaattatttgtggtgcaattcgtgaaggggcggcttttatgttttatcctgaagcaaatatattatttaaggggaaaattgatccgaaaagtggcacacctgcatataaaagagttccggtttttgtttatcaataaaatctcgttctcagtttctagactttttatttctcacgcagaggcgcagagaacgcagagaaataaacaatttctagacttttatttctgtcacctgttataatcttataaactctatcaatagttaataaagtagagaaaactatggttgagcaagttttaatccaggatattgatcattgtgatataccggatgccaaccctagttacagaagatgatacacaaacgggttatttgtatggttactaatactttgacattaaacttaaatagtgttgatcttaccgatgatcaattttatcaactatgtcaaaaaaacagtgatttaaaatttgaacgcacagcaaaaggagatttaattattatgccaccagtggggggagaaagcgggaatcgagaagcagaaatgattgccgatttagttttctggaatcgtcaaacaaaattgggttatacttttagttcttcgactatattcaaattaccaaatgggggcgatcgctctcctgatgctgcttggattaaaaaagaacattgggaagcattaaccccggaacaaaaacgcaagtttcctcccattgcaccagattttgtgattgaattaagatcagcaacagataatatagaaactctgcgttataaaatgcaagaatatatggatgcaggggtaaaattaggatggttgatcaatcctcaacagcaacaggtagaaatttatcgtttaggaaaagatgtagaattacgaaatttgcccactgagttattaggtgaagacatattacctggacttattttgaatttagattgttattaacatttatttgtaaggtaattttttatcaaggtaattttaaatttaactcttttaaagttggatcatctgcatttattgtcactgtattaggttcagcaggtttaccattaactattaattgatatgttcctaatggtaatatctctttgctttaatgttttcaggacttacgtaaaagggaacgaaagtaggggtaattcatgaattacccctacacaagaataaggttttaagtcacatcttgcgtaagtcctagttttattggttcaattattgactagagtagtatttgccattcgtacctaaaactaccaacattttctgctgtgtgacagtcggaaaagtcggatcttcaggtcggatcaagtcggattctgtctgaaatacttttttggttaaatatataaagtaatatttgccacaaaaacttggtaactatcacaatttaaattaatcgaatgccagcaaagtgctatcatcaagatcatgatcgggtagtagactagcacgaccaaaggagtatttatggcaacaattactattcgcaatatctctgatgagttagtggagcgcattaaacgtttagcagcacaaaaaggggtttctatggagcaagaagtccgcgatttgttgcaaaaacgctatgggcaaagagatgaagtgcttactcgtattcgtcaacgggtggaagtgttaccaatggaagcggaaagccgggtacagtcttggaagtcagaaggaagactctgatggtgattgatacgatggtatttgcttatgccctcttgcgcgtagaggacaagtatgaacaggcgatcgctgctttagaatctgtagatcaaattatcgtacctgattcgttgtttgctgagttgggtaatgtgatttggcaatggatacaatttcgacaattaccattacaaataggtttagattccatcctggatgctgaggcattagttgatgtgataatttccagttctcaaattcgggatattgctttaaaactagcagtggaatcaagtcattctttctatgatacgttatttgtagcagcagcaattcaatctgatactcaggtattaacctatgatcaaaaactagcaaataaatttggccattacgttctcttgttggaataagttaggatcagttaatagagtcctcaaatagtggataaaatcatggttgagcaacttttaatcaaggatattgataattgcgacgtaccagatgccaatttgctagttacagaagatgatacaccagtggataatctcgcatctgccaaacaacaacgtttattagtcggttctctttacagtgctttgcaaaatcaggtttttttagctgaagctaatgttggtgtttaccatacctatggtgaacctgccatagttcccgatgtatttgtgagttttgatgtagaaacaccgcaaaattggtgggaaaaacaaaatcgttgttatctggtttggaaatttggtaaaaccccagaagtagtgatagaaatagtttctaatcaagatggtgaggaattagataaaaagctaaaaatttatgaaaaaatgcgggtttatcattatgtcgtctatgatcctaatctaaacttaggagacaaagttttaagagtttatagtctcaaagccagacgatatgtagaaactacaaataattggttagaagaaattggtttaggtttaactttatgggagggagaatttgaaggtaggaatgatacttggttacgttggtgtgatcaagatgataatgttttaatgactggtgatgaaagagcaaaacaggaaaaacaacgggctgaaaatgctgaacaacgcgctcaattattagcagaaagattgagagctttgggtgtagatcctgatagtatttaatcaatattttatatgatctcgttcccagtctccagactgggaatgctatcaggagtctctgactccggttaaatatcatttttaatattgagattaatccaataacagcaaactgctatcatcatgattggcttatatgggaataagaaataaagacaaacgaaccacttcagacgcagagaaagcagagaaataaaataaaaatagtcggttaaaaccgacttgagcaagtcctaagttgacaatttcatagacaaaactatacttgtattgacaaaaatcaatatatttttaggaaaaaatcaactacttgatatataatacggtgatatcaagtattgaattgagactattgccgacgcgaaaaccaagcaatgatggtggtagtctttttcagaaacttaattggaacacaatcgcgtctggctaaggcgtgaaagtctactgagggataactgctcccatgctcccgttgaagtagaaagtaaagtctagttttgtctaggttttatatagcagcttttagacagggaatttattccctgtcatctatccctgtcatccattccctgtcttataaaatattaatccccatccccaatatcccgcttaggtggacgcttataagcaaaggtaaaactctcaccactagcaatgactttccgcatctcatcatacatgggataattacctacaccacttaaatttgcccaaccccgcgccctcgttaacgcaacaaacaactggttacgaaaacttacatcactttcattccgtgcaacgtgatcaaaacccaccacataaaccatatctgcttcatggccttttgcgcgagtaatacgagaaaccgtcaccccaccatcacaccaaaatttatcaggatcattattgggatattggggaactaaatcatttaattttaaagcggtgggaatataaacatcaatgtcctgttccattaaaaaacttgcaacagatgtttctaactccattacttccaaaggtgaacctaaaactaaaaccaaaatatcccgactggggttaagtccatcatggacaatattgtgcattatcttttctgataaagcagtcatttctgcttcatgagaagaaaaagtttcaaattctaaaaccggttctccccacagttcaggaatagggtttggtgaaaattcaggttttctagtaatagtaactggttgaccaactcggcgaaaatctccttttacttcataaccaattctatgccaatcttctttatttgtaattcctgttaacattccttcaggacgtaataaacccattcccattgcatgagcagcagttaaaatttgcccgggtgtgcgataacaacgacgcattacttcagaacgtttaatacctccagaatatagaggttgtttattcaataaattacttaatttttccccaaaaacttccttagctttgggaactactaaactatctaaactttgcgcttcatcataagcccaaattaatcttttttcttcggttttatcttcacttactggttttaatgcttgataagctaaccaataaattgcttgtttatcttcatattttaaatcatcatctgctactaaatcttgaccttcatctatcaaaattgcatcaaacattggttcaattttgatttcttctaaaagtcgtttacttaaatctattaatccccggtttggttgtctttccttagtattctggactgttcccggtctttttccgtgatattcacaaatggtactgtataaaccaggttgttcttttgcaccccaagcatgaagtacctgtaattttaaatttgttttgggatcatagtgcatttctccacaactaaaacgccgtatccattgatccaataaaccaatcattaaatcatataaggaacgggtaaaaaatactaaggcaatatcccaatctggatgtttcaagtgcatacttgcggctttttgacagagtaaaactgtttttcctgaacctgcaataccgcgaatacgttggggaccgggaggaatttctttaccgatatgttcctgttgtaaatctatttcatagagtttttctcgtaaactgtcaataacagcagaacgggtttttcctatagttgcaactcgttcacggggaggtttacgcaatacaggagtaccgccaactaccgaaagtaataattcccaatttttatcttcgatattttcaccgggaatgataatattagcttggttaatgcgttctattaaaccagctttacctaattgatcttgaaaaataattggcggaatatcgggtaattcatgaaaacctttttcttgccattgttgtgatgtaatatgcggtaaagcaatgatcgctctaccgttaatttttctccaaagtgcagcttctctatcactataggatatgattgatcgcagttgatgttctacaatttgatagggattgatttcggtaacgtcactattttgcaattgccaagtttgcctgttaatattagtaatctggtcaatatttagagattgaacagcaatgactaatactccaaattctcgatcaactattaatatatccggttcttttctggtttctcctactttgaaaaaaataggataccgccaatatccaatgcagtttctatctgcaaatgcaccccgtacagcatcccatactttctgctctccgtcttgattttttatagcttcggtagtgataaatttgctaccctgttcttcgatgcctacagccatttgttttgcctgtataagatggttaatactgttaagctaacactatctatagcttgtgaacagtgagattatacggatatgggggtttcagtatttttaactataaatttacgggttttctcaaaaaaatgtgaatttgtgtaagttactgtcagtacaatattgatcagaacatagtcagaacataggttgatgcatacactggtatctagtacaaatttgggcattgcataaatgcgggatgttttttgtgtgtagagacgttccatggaacgtctctacaaggagtttgaatatatgcaatattgttttcatccccaaaatcagcaacacccaaatttgaaagtattcgtcatctatctctatcttctctaatcatttctgtactatctcgcaacttaaaatctgctggatttgaacgacgaatattttgggtttcttctaataatttcaaaattttagtacatcttcctgattctatttgctgttgttctatttctaatgctgtttgtaaaagtagtacaatttgagattctatagagttatgttcagccttagctagttttactatttgttgatataattcatcgggtaaattgatattgttaagagtagtcattctgaaaaatcctcaagttattattttttattgttaatgattataacataaatactctacactcacatctatttgttttgttatattttttattttcatttttatttttactttatttatgttaaaatcaacatattatagttatagtgaagacgattatgttaaattacgatttgcgtcaatgtcttccatcttctgcggaacttcctgactctgatgatactccagtggataacgaattacaaaacctaattcctaatttattagaagcaattttagctttagtttggcaaaatagaaatgattggttttttggtgtggatatgggtatttactatgcaccaagtaaaccacctttagttgctgatggttttttgagtttgggtgtagaacgttttattggtgaggaaggaaggttaagttatgtactgtgggaagaagataatattcccccgatttttgctttagaagttgtgtctaaaacctacgggggtgaatatgaaagaaagaaaattgactatgcaaagttaggaattttatattatgcaatttatgtccctaatcgtcaaggtcggcgaaaacgtcaacctttggagatttataaattagaaaatcatcaatatattttacaacctcaagggcagttatggatgccagaaattggtttagctttaggaagagaaaggggtacttatttagggagaaatagagaatggttatactggtataatcaacaaggtgaaaggttgctaactcctgaagagtttgcacaacaagaaaaacaacgtgcagatcaggaaagattaaaagcggaaaagttagcgcagaaattacgagaattaggagttaacccagatgatatttaattagggtttgctgagaaagtctttccgtgagggcataggagtcaggagtcaggagtcaggagtcaggagtcaggagtcaggaggagatttgaaaatttctttgccatctcttgaaatcccaaaaaatgcacactttttccagtatacccttcaaaacccttgcactaatttctgtgtttatcagcctctaacctttgatatatcaaggttttaggtttattcagcaaaccctaattagtagttatatatccccagatccccgacttctgcgatcaatctacattttatttataggatagtaaaagaagtcggggatctgatcactggtatctattccatttctattctgatttaataaattttcccgtagttccaggaatttgctcattttgtttgttcatacctggtaacattgcagtatgaaaaatcaggatagaaattaatgtgaacatcaccccaaataaaatcatatctgttcctgaacgactagaaataatcacagatgaattatttatttttccatttgataaaggtattgttttctgtacagatgggggtttttgtaagtctttaattatttcctgcgctgattgatatctggtatcttgatattcatcaatcattttacataaaatctcttttaaatcatcggtaatattaatatccctataccaagtatcagttaatttttcaggttttaatcccgtaattaattcaattattgtcattcccagtgcataaatatcactatttttttctggataacctctcatttgttctatgggtgcatatccacgggaaaatatattagtacctggtgtttgtaattttgtatcattgggattttctgctttgactgcaccaaaatctattaaaaataacttgtcattatgatctatcataatattatcaggtttaatatcacgatggataataccttttttgtgaatataatcgagtatttttaagatatctaggagaattttttgagatttttcaatactcaaatttttagcttcatgcagtttttcccttaatgtttcaccatgaatatattgttgtactaagtaatattgttgattttctgcgatataatctacaaaatcaggaatttgttgatgatgcaacttttgtaaaatttctttctcatcattaaacttgcgttgagcgatcgctattttatttggctcattgctagaaaatgtcaattgtttaaccgcgtagttttttccatactgatccactgctaaataagttgtcccaaaattaccacttcctaaaattttcagcagttgatattttccaccaatattattcatatagcaccaccatcacagagatgatccccttcttcatcttcagcatcagcaaagattaagaaattttacttaatctatactataccaaatatgctatgattggtgaaatttaccttggttgatttattaagtatttttacggtaatgattcaggggtaagatccccgatttctgtgaataaacgataatttcttgtgaggcgtaaatacctcaactggctttcatcccttgcctaaaggacggttaagtttttacgccacgctccaaaacttaacctcaagggttttcagcctttgttcttataaaagaagtcagggatctgaattttttttgatttttcttaatttttaatggtgataactacttctctaattctcccgtgatgggggagaaatagaggagaatgttattttgtagaaacaggtgtataaggtggctaggtatgcagataaatgtaacaatttcaccagagaatgatcaggccttaacttcaacattaccgttgcggatagcccaagctaattctaacatttgagtccagcgtttttgtagctgcttgggagtgcattgtacagccttagcgatcgcctgatcactttcctttgcagtttttaagttaaaaatttgctgttgttgttcagtcaattgattccagaacacttcccattgttgagaagacaaacccaacttatgttctaaaccagcacccaaccattgatgtactaattgccaatgatgctgtttagcaaacttctcaacatgatatttaaatctttgttgcaaataatcacgctgacgactggttaaacctaaaatttggtcaatttctggtgcagacaaatcttgaagtttcaaagacaaataattcatacagtcagattgaccttgagactccagatatttcatcaactcagtaattacgcgatcgcgttctgattcctcagaaggatcaaaactaggtttagcaaccatctgggatctaatctgctgcaccgctaaattacgttgataagattccgcttcttcagttttagcagaatcaaccgccatttcaatatcaacagtcgtttcctggggttgacgacgagcaaaaccttgagcgcgtaacacgatcaactgttgattcgcaccaccaggtaaattaattcgacgtttggcatactgctccgtaaacgccatatactcagctaattgtaactgagtccggggagtataatcttcagctaattcattttcccgacgaaaagctttaatcgcttcgatataaaaagcttggagaaaatcctcaatcagattataacgagcttcaaaacccaattctgagccagcaagagtaacgtggcgataaacaatagcacctaaactactatgtaactctacccttccttgtcgtgaacctaattgatggtaacgcaagcacttttgtaaacgatgtcttgctaaagtaatctgccaagacctaacttgcccagaagtttgaatgcgggaacttttatcacatatccgttctacttctttggtgatgcgttgggctacagcttgcacacatccagatgaagccttgacttgagactgcatttcctgacaaagaagctgtactaaagtctcagaattagtacctgataaatcttcatttgaaacatcactatcaaaagcaggtgtagaatttggcagattaacgaggttagctttcatgacttttcctggagttggtattgcaccttaactaaaacgcagacacagttcttaagtccagtcatcatcagagaatattggtgacatacattttatacatctatcaagactcgccgcaaatactgttgacatataagactgtaggaaatttcagaagttaaggggcctgtcaagtgtgtcgcttttttgatcagcaaccagattaaaggtgagatatcggtatggagaagacgctaaaaatgattcaaaccctagcaatgctaagatttgccgccatctcttgttccgtgatcccagcgttctatggtatgacaatttcaaaattgaagtatatttatcacaatttgcgaaacagagggtggaatctgtaaagctgaattattatacccaagctgctgctgcttcccaacctaaccccctccgtgtaattattggttcttcatccgtcaagtctaaaatggtagacacttgattcgtaggttcttcacctgtatcaataatgatgtccaccaagttatctaaacggtcaaatagctctacccttgacagaatagattcagaatctactcctaatatttcatcatctgtgtcattgtgtggtaaatgtgccgaagtggaaataatcggatttcctaacgcttccagcaatgccaaacataccctatgatctggcacgcggattcctgttgtttttcgcttaggactttgcaccagtcgcggtactaacttggtagcaggtagcaaaaaagtgtaaggacctggtatcaaacgcttcataatccgataggctgtatcacttacgaaggcataagtagacacattagaaagtgaaggacataaaaaagtcagtggtttatcattggctaactgcttaatttgtctcactctttccaccgccgacttagcattcaaatcacaaccaatggcatagactgtatcagtagggtagagcatgatagcgccactagaaagcgccaactttatatcctctatacggcggttttgagggttatcaggatgaatttcaaaaatcttggccatgactggggattagggactggtgactggtgactggtgactggtgactggtgactggtgactggtgactggtgactggtgactggtaatgtgaatagtattaccattaccaattacccattaccaattacccattaccaattacccaaataatttatgcataaaattgcttattttcaatgtcccactggaatatccggtgatatgtgtctgggtgctttggtaagtctgggtgttcccgtagagtatctgatagaaaaactcaatggtttaggaattgagcaggaataccagttacggtcagaacttgtccacagacaaacacaacaagcaactaaggttcatgtagacctagtacatcaccatcaccatcatcatggccgtcacctgccagaaatagaagagatgattgtcaaagccaatctaccatcacgggcaacagcttggagtttagccgttttccgccagttagcagtggcagaaggggcagttcatggcattgaaccggagaaagttcatttccatgaagttggtgctgtagacgcgattgtggacattgtggggacttgcgtgggtttagattggctaggtatcaatacaaataaagaaggattacctttaatatactgttcaccgtttcccactggtgggggaattgttcgtgcggcacatggacaaatgccagtaccagtacccgcagttttgaagttgtgggaaatgcggagttgtccagtttatagcaacggcattgataaagaactggtgacacccacaggggcagcgatcgccactactttagctagaagttttggttcaccaccaccaatgaccctcaaacaagtgggattgggagcaggttctcttgatttacccatccctaatatactacggctgtggattggtgaaatttcaaatcttcaaaccagtgttacagatgttgctaatactcatcaccattcagaacatcatgcagagcatcatgcagagcatcattcagaatcacatttagaacctatttcagttttagaaacccaaattgatgatttaaatccccaagcgatcggttatatttttgatgctttatttgcatctggtgcggtggatgtctttactcaaagtatagggatgaaaaaatcacgtccaggacttttattaaccgtgatttgtcatccagaaaatttagccatttgtgaagaaattttatttcgtgaaactacaactttagggattcgtcgcacaactcaacaacgccgtattttacaacgagaaatacaacaggtagaaaccccctatggtaaagtcgctgtcaaagttgcctggaaaggagaagcaacagcaaaagtcattaccaatgtgcagccagaatatgaagattgtgcagacttagcacgaaaacataatattccttggcgggaaattcaacgtttggctttacataattggtatagtcacaattaacaacatcacacaaaatcaaaaatgtaaaaagtcaggagtcctgactccttgaactcctgactcctgactcctgactcttgactcttgactcctgactcctgactcctgactcctgactcctgactcctgactcctgactcctgactcctgactcctgtattcttcttaatatcaatccgcttcttgtaaagtcctgtttattgcttctcctgtatcttctgctcgacgttgaatatttctaccgatgtcttcagttccacgttgtacatttttagttaagtctttgactcctctttccacattttcctgaagattttccattcctctttgagtacccttggttactccttctcgcaattcttccgctgaacttcccacatcttcacctaagtttttcacccgttcaccaaaaggtgttccttctcgataattacgaatatattgatcagtgctatcaattcccttgcgttcaatatttctctgagcattttctatgagttgatctgctctatatctggctgctttttcagcttctcttgctctgggatctacatcactaaagttgttcattcctccttgatatttggaaataggataatcttttgtcggatcatatcttcttgcatttggtggttgtgccggttgtcccgctatattaggacgattacaagcttgtgctaaacataggaatgttaacgccaaaaatatgcttaaaattttcaatggtcgcagattttgtaaccaattagttagccttttcatcttatcctccttgtattttttcgactgcataaaagcataaaagctgaatcacaaaagtctatttacttactgcgggatttttctgtaattcaggtctattgcttgctttatctgctttttattttaaaaatcctgaagctttttctactgactattactgattactgattactgattgctgaatacttacatagtttgagtttgatttatttaggtttgatttatttacatggaaaacctgatattattctaaggatttttaaatcaactctacctctagcttaggtgacattttagtggtgattaatttttgattttatctaactatagggagatattatttaatataatgatcttgctccatttaatgcttaaattctacaaataatgaaaaaagttgtgaaaaacgctttacgctggttcattttcgggggaacgctattttttttagggaaagctttaaaggataattggctagaagtgagttctatccgtatagatgctgccggatgggcaattttaacaattgctactggtgtaactttactggcacatacttgggctggttggatctggacttggatattaaaagagtttaatcaatctgtttcaacttttgaatttattcaagtttatttaaaaacgaatattgctaagtatttacctggcaatgtttggcattattacgggcggatcttggcggctaaaaatgctaatatttctactgttactgcaactttaagcgttttattagaacctttactcatggctactgcggctttaatgactgttgttttgtttggtagtcaattggcagttaataacactaatatttgggtacaaattttgcaatttctcagtttagttgtgctgctgggtgctgttcatcctttggttttaaatcccataattcgctttttatatcggttaaaaaatcaaaaaaatcaaaattctacatcagaaaatcagtctattaatggtttaggtctgaaatgctatcctctgcttcctttgttgggtgaattgatttttttaggattacggggaactgggtttgttttaactatgtatgctttattttctgtaaaattaagccaaattcctttattattcggggcttttagttttgcttgggttttgggtttggttgttcccggtgcgcctggtggtttgggggtgtttgaagctacagcgatcgctcttttacaacatcgttttcccgctgctttggtaatcagtgcgatcgctctctatcgtctcattagcattttggctgaaaccgctggtgctgctttggcttccctggatgaacgtctttctagctaggtgattggtgattgggaaacaaggaacagaaaattataataaaagtattaccaattaccaaaaaaatgatcgctgctaaagacaaaaccccccacctcaccccagaagagtacctgacctgggaactcacccaactggaaaaacacgaatatatcaatggccaagtttacgctatgagtggcggtagcgttaatcatagccgcattgccattagatttacgactatgtttgatacccatttagacgctagtagttgcataacaggtaactcagacctcaaagttaatatcttaggtactactaactacacctacccagatgccagcgtcacttgcgacgaacgggacaaaaccaatatgcaatatattacctacccctgcttaatagttgaagttctttccaaaagtaccgaagcctatgacagaggtggtaaatttagaatgtatcaaaataacccagctttaatagattatcttctagtcagttccaccagcctagaaattgacctttatcataaaaacgaggctggagactggttaattattaactacaaaccaggtgacaccatccaacttaaaagcattaatcttaactttccccttgaacaaatctatcgcggtttaaatcttgaaccagagaatggggaataatgcttttattctatacttttactgctatataaaacctagacaaaactagactttactttctacttcaacgggagcatgggagcagttatccctcagtagactttcacgccttagccagacgcgataaattaattgcagcgtttagatccctatctat

SEQ ID NO: 56 - DNA, 34678 bp, Sphaerospermopsis sp. LEGE 00249
  LEGE00249_71
gtccccagtccccagtccccagtcacccaataactcaccacgcattacagttatagcttgtcctgctaaaaaaacgcgattttcaccaggataataaacttttactactccaccacgacgagaagcttgataagctaaaaactcatctttttttaacctttcacgccaaaatggtgctaaacaacaatgtgcagcaccagtcaccggatcttcatcgatacccaaaccaggagcaaaaaaccgcgatacaaaatcatattctccatcaccaatactggtaacaattacattagcaacgggtaattttttcatctgttgaaaattcggctgcatttcccgcactaattccgcagatgcaacttctactaaataacctagagaattgaggtaaactgatttataatctattcctaaaacttcatttaatgctgatggtggttctgtggtttgggaataatttacaggaaaatctaactcaatccaattatcttttttctgagcaattaataagccacttttggtatagaaacgggcttcttgttctggtgataaatgaccttctgaccataatacatgggcgctggctaaagtggcatgaccacaaaggggaacttctaccgatggggtaaaccaacgcagattaaaaccgtcattttctctgatcaaaaaagccgtttctgataaattcatttcttgggcgactttttgcatccagtcgtcaggttggggaattgctaatacacaaactgcggcggggttgcctgtaaatagtgtattggtgaaagcatcaacttgggtaattttttgggtaatttttttggtcatgttttgggtgataatgagattatttgcataatatcattgattgatggttacagcagaaattgaagcttatcgactaggaaaattaacatcttcataaacatcggttaaaagacagttaaaatttacgcttgttaactccaattgttgattacctctataaatataaagttcccatcttccttgattattgcgacgaaaacaatcaactctttgacgattttggctcactaaaacatattcttgtaatgtttctaattcttgatagtcaatgaatttatcacctctatcaaaggcttcagttgcaggtgataaaacttcaataattaaacttggatagcgtttaaaatattcaaaatctgtatctcttagatcgcaagttaccatgagatcagaataatagaaaatatccagagtttcaattcttgctttcatatcagcaacataaagacggcatcctgtaccgcgaatatgatttcttaaaagagcaactaaattagtagtgattgtcacgtgggcatcactagcacctgccattgcgtaaatttgcccttgaatatattcatgtttaataggactggatttttcagcttctaagtattcttctggggataaatattggtgagattgggcaagagtcatatattttatggttaataatagatgagtttttaggtgtgtttatagtatagcaaattttgaggtatagcaaattttgagatttttttatttcacgcaaagacgcagagacgcaaaggaagaacgcaaaacagaaaatgaataaaaaatctaaaccgatgcaaaaccagtaaactgtctaacataaggtgatctaaatcctaaaactatatcagttttcggtacacctaactctactaactgttgagcaattccttcttctgtaaaatctctttcaatccaaattttaccatctttaatcttaatatgaatgggacaaccataaattctattttcatccttccagcctgtatacaacaataaataaatatcccgttctgtatcaaacacaatttctgtattttttaaatcttcctctgcttggtcttttgcatatttagagataatatcttttactatctcccgataatttaaggtttccataatacgatttcctcctttgttagacgtaaatataacggatcatcagtaattaaccaactatccttttctaaggctattttaacagtattgtgaaatatatcttttgctgacataaaaagttaaagtgatattttttattaaattatacctgaatttttaagtaatgcctctatattatattcgtagtttgggttaaacaaagtgcaacccaacgcaataacattataaagatgttgggtttcgttcctcaacccaacttacatacttgtataataaaaattaatatgataagcatttgtcctgatagtaaatattttagtttcgttataatattaactgagttgttatatatctttaccaatacaactttacctaattagttactgaaaggggtatttgtatgattaccattactatcttgataggtattatcttaattttgagttatcttttatttaaagaacataatcaaccacaattaaagattgctacacaagattttcagaatgtggctaaatataatttaatcactaaagtttttttagatgtattttctcaatctcagcagttgaatacaaaagttgagatattgactaatgacaataaatctttaaaacaagagattcaaaagctagaacaacaaattaatactttgcttcaggaatatcaaacaactttagagttaaataataagttacagatacaaaatactatttttacacaaagaaatctagatttagaaactaaccaaaaatcctttattcaaaagttgggtggtattgtttataaggagaatttagaagataaaacatgggatttagttctagataaagttcaggtgttaatgaatgaacgcaatgaaactgtaataaaacttcaagcgattaaccaagattttgaagttattaaacagacgaatgagattcttcttaaagaaaagaatacttttaatcaatctctggaagttctcaagtctatcatcgctacaaaagaaaatgagattaattcattaacaccaaagttgaggggtttagaatttagatgtgaagagttagttaaagatttacagtctagaactgataataatattgagttggaaaaaatcaaaaatgatttaaaaaatctgcaagatgtgataattcacaaggataatttaattcacagtttggaaatagaaaagagtgagaatttacaaaagatatctttattagaagcaagtgttattactgaaaaatctacttgtgaattactgacacaagagaaattgagtttgaatagtcgtgtgcaacaattagaagacgaaattagaggtttaaataataaacctatagatattaatatagaaaggttagaatctcagattgctcaaaaagataatgagattaagaagttagaagatgagaaaaatcaaaatattcaaaaagtaaagcagttggaaataagcgttactgaaaaagaattagagttaaaaacaactatagaagatagtaataatcgtattcaagaattagaagaggaaagagattctttaactgctgatttaagagatattgaaagaaaattaagaggtgttgcaagtgaattaagtgtatttaaaggtggtaatattagtggtttgactgaggaattacaaaaacagattgctcaaaaagatgctgtgatcaaaaaattggaatttgaaaaatctgaaatccttgaacgtctcaatatattagcggaaagttttgatgaattaacagaagattttaatgaattaacagataatttcaatgaattaacaaggaattttaatcagaaagaataccaactagaagtagttacaatagagaaaattgatctggataatcgtgttaaagagttggaagctgatgttaaagcattggaaggagaacagtctttgttaattcagaagttaagagataaaaaatcaaaaattagtgaattacagcaggatctttcattaatgtctcagtatgcagatgatctagaacaatatgcggaagatttagaacagtattatttagaagagttagaaacttattcagatagttctaatataaacgaattagaggagttgcaaaaacaaattgatgagaaagatgatgatattagaaaattgacatctcacataaatcttattttggaagatgagtatttaaaggatttacaacaagaaattagtgaaaaagatgcttgtattaggaatttaaaatctcatataagtcttcttttggaaaatcagtctttaaacgagttagaacagcatcttaataatatatatgattatttttatgaggaatatatctatatttacacaactccgttaaggtcagaaatttttataggtatggatattgatactatgaattttttcagacatcgtttgtacgaagaacaacgcaaagtcaaacatcttctcggtatgacaagaaaaataaatactttgatgaggtacagataggttatgtccttaaatcctaaaccacagcaaactcagtcaaatatttcacataatgatgacaattaatttatgattcatcagctaataattctgttagaatttcttctgtaagtcctttagcttgagcttgcgattttgtaagttaataagttctgggatagttggatgagtaaaaatgtgatgactagcgttgatacgtgataaagaaaaaccaaaggcttcaactaaagtcactaaatcctcaaattgaagatttctaggttttgtctcccttgctcactttgagggttttttctttttcccctacttattgagccgatacgatttgatcaccacaaaaaaagaaaatgtttaaatttagaaacaatacttaataaatttattgagaacatcaaccaatatcaagaaaccgcaaaatttctcaagaaaaaataaaattccaccgattctaatttctaagaactaccattaaaacaaacaatcaaaaattggtgtgtgccatcatgacaactaaaaagcaatttaacagctttgaagaaatgctctctggttctgatgtaccagtgttagtagacttttacgctgaatggtgtggtccttgtcagatgatgggaccgattttagaacaagtgaatctgcaattaaaagaccgtttacgaattgtcaaaattgacactgagaaatacactcaattagctagtcaatatcaaattgcagctttaccaaccttggtattatttaagaatggtcaacctgtagatagaattgaaggtgtactgcaagcaccacaattaattcaacatctgcaaacactggtttaatttggtgattggtgattggtgattggtaatgggtaatgggtaatgggttattaatcttcccagtccccagtccccagcgatgcactgagcttgtcgaagtgtccccagtccccagtcaccagtttttaagaacgtctggcatttaaacaacaccattctttgcgtttccacagggtagccacaacccaaccattttgttctaaaacatcagccacagctttagattgttctaataaaataccactaaaaataccccaggtacttggtttaataatagctgccatttctggaattaactcaataatgacatcagccaaaatattacaaacaataccatcaactggctgatcaattatttttgtcaaaacgtccacactacccaaggctgggatcaagcgttctgaattaatatcattaagggtgcgattgctcaaagttgattttaccgccaaaggatcattatcaactgcataaactttttttgcccccaggagtatagcacctacagaaaggatacccgaaccgcagccaatatccgcaattactagggaatcttttttattctctgtacctataaaagaatcaggaattgcacttaggcgcatttccagagattctagacatagttgagttgtggcgtgattacctgtaccaaaagcaacaccaggatcaagacgaatcaccaaccgttctgatgatgcaggtaatggtagccatgcggggttgatcaagaagcgatcgccaatatcttgaggttgccaatactgtttccaactactagaccagtcttcctcatcaatcaaattccagtgtaacagcggagaaggcaacccgatacacaaagcatcttgacgcaaccataaagataacgccgataaatctaataattgtgcttgaaagctaggcaaataagcctttaatagcgatgaatttcctttgctttcaatagcagtaccacgacagccaaaagtttccagtcgccaaaagatagaatcttctaggtctggttcacataaaattttcagttcccaccaagtatttgccatagaattttaaattactagaacagggaacaggtaacggggaacagggaacagggaacagggaataaagaatataactgtcacctgtcacctgtcacctgtcacctgttttaaagtgttactgtataagcatcgcgaataccagatacttgtttaatttcatccaagatgccatctggtaaaggatcatcaatacttaaagccatgactgcatcaccacggacgattttccttcctacctgcatactggcaatgttaacgttaaaactgcccagtaaagaaccgagtttaccgataattcctggcatatcccggtgtaaggtgaacagcatatatttgctaggtggcacattaatggggaaaccatccacatcagttaagtgaatttccttatcacccaacaaagcacctgtgacagagtgagtacctaaagtacctgtagcttccaaatgtagcgaacctgcatagtctcttgctgaagcatccctggtttcaattacccgaatacctctttctttggcttctatgctggcattgacataatttacccgttcccgcaaagcttggtaaagcaaccctttcagcgccgctactactaaaggctgactcttattagtagccagatccccttgtagtttaacattcagtgtttccaccctgccacctgccagttgtcctaccaagttacccaaggtttccgctaactgcatatacggcttgagttcttccaagatatcgggtccgagtccaggaatatttaccgcagaacgggctggtagtcctaacaacacatcgcggatttgttctgccacgtctatggctacgtttacttgggcttcggcagtagatgcacctaaatggggtgtgagaattacatctttactcagcgatcgcaactcagattctcccaaaggttcagagtcgaatacatctaaagctgcacctgcaattttaccttctttaatcgcccctgctaatgctgcctcatcaataattccccccctagcacagttaataattctggtggtgggtttcatcttcgccaaagttttagcgttgattaaattggcagtttctggagttttgggaatgtgtaaagtgatatagtctgcttgttggaataataaatctaattccaccaactgacaaccaatttgttctgctctttctgtagaaataaagggatcataagctaataacttcatccccattgccttagctacatgagcaacatgagaaccgatttttcctaaccccacaatacccagggttttcttatagacttccgcaccgacaaaagtttttctgtcccattctcccctttttacagaagcattagcatcggggatatgacgagataaagataacatcattgctaatgcgtgttcggcagccgcaatggtatttccttctggggaattaacgactacaatacctttacgggtagccgcaggaacatccacattatccacacccacaccagcacggccaataatttttaattgggtactggcttcaataatttcttgagtaacgcgagttccagaacgaatcatcagcgcgtcatactcaccaataatttctattagttctgctggttttagatttgttttgacatcaactgtagcaacttggcaaagaatgtcaataccagcttggtcaatgggatcggaaacaagaaccttagacatgattacttcatttacaattataggttttccgcaagcatttagctattagcggtcagcagtcaggtttttaacagttacgtccaaaatcatatatttgataatctactgtttgataaaacattctgactcctgactcctgactgcttacgaatttgctgtacaagatttttaagtttagtccttatccgcaacaattcagcaaaaattatgtgtttctataacaaactagcagccttacgtactctatagtaatggaattactcagatgtacctaaatgacattggtgattggtgattggtgactggtgattgggtaaaattaaattaatgaccaatgactaataactaataactaataactaatgaccaatcaccaataactaattaggaaattggccaccgcgcacttctaaggcgtaactttggactgcgttggtaatttgttctcgtaagtttgtataaacttttgcaaaaggtggctgtttttctgaaagccccaaaacatcagaagtcaccaatacttgaccatcacaatcaacacccgcaccgatgccgatggtaggaacacgtactttttgagtaatttctaatgctaaattggcggggatatgttctaagactagagagaatacaccagcttgttctagagcgatcgcctcatttaaaatgcgctctcctgcggtctgagttttgccctgttgtcgcaaaccgagttgatgtactgattgcggtgttaaacccacatgacccatgacaggaataccagcttgtaccaaccgggctacagtttcgaccattgccggatagccaccttctaattttaccgcctgtgcgccagtttctttcagtattctgccagcagagtgcatcgcttgggaaacactttcttgataagttaagaatggtaaatctaccaccaccaaagcccgttttacaccacgacgcacagctttagcatgatggatcatttcttctaacgtaactggcagagtggtttgatatcccagcataactgccagagaatcacccaccaagattaaatctacaccagctgtatctaacagttgagcgatcgcataatcccaagcagtcaaagcgacaattgcccgtccttgctgtttccattgtattaattgctgggtagtaattggcataatcaggagttcaggagttcaaggagttcattcaggaggcaggaggcagagggcagagggcagagggcagagggcagagggcagagggcaggaggtaggggaggtaggagttatttattttggattttggattttggattgtttttgttaactccaatctaaaatctaaaatctaaaatctaaaatctaaaatctaaaatctaaaattttttttccccagtccccagttcttacttcacactccgcccaaaaccaaaatgaggccgtgctttatccattgtaggcattaaccacgctaacccctcgctggttcccacccataacttgttacccacatcaggggcaagagtcaacacccgactggaaggcagtcccgctacttgatctaataaagctcctgtatctggatttaatcgtaacaaaccgttgttggttcccacccacacactaccatcttcagcaaaatgaactgaagtgacatttttgccgcgcagaggagttacagaccttaacacaatcccatttttggggtttattaccaataattgatttggcattcccgcccaaattaacccttcaggactgatagctaaagtttgtactgtcgcccctggtaaattatttatcctcttcattatcaaagcactgccagtatttaccctgaccagtccatctaaagttcccacccacaactgaccatctgcatctaaggtcatggcgttagcactcacacccggtagattttttaaagttgtcataattaagccttggtcgggactaaccaaagctaaacctgcatctgtaccagcccacaaataaccacgtttatcaaccaacaaagataatacccgtttggaaggtagtaataaattttgtgctgtaatttcattagtctgggggtcaactcgcgttaaaccttcatagttaccgacccacaaccgacctactttatcttcagctaaggcagtaatagtcacatttggtaaactaacacgggcaataatattacctgtattcgggtcaatgcgtgataaaccccgccaagaaccaacccacaaattaccagaaaaatcctttaataagttactgatccgataatctgtttctgtttctctctccaggacatcccgttcatcgggtaaagggtctactctttttggtgggggtgcaactgggtaagtagttgcattattgggttttagatcagggttattttgtcctagtgcagaattttctaaccagggtacagatattaaccccaaaagcgcggatattatcaataaaagagtatgtttgtaaaatatggccacggttatattcctttctagttaattttactaatgtcttatggctgtattcttaccatatttttccattaattggttataatgtagcaaacttgaaaagtcagtatttagaagacagaatacataattgataagtattcagcagtcagcagtcagctatcagctttcaagattgaaatacaaagaaagtttaaaaataaagggtttcaagttacgcatagttcattttcggagatatctaaatagacccagtatacccctagcgcgttttgggtacatatgtatataattggtaatatttttcatcttcggtagaaccacggtatattttccatttaccgttctaccattttttcgttatatatttcggacaggtctaaagactatactgaaataaataaagagataaatacagaagttatcaagaaaatacaaactatttataaacgcagcattagcaatttagaagaaagaggtttaagaactttatttttagcttatggaatggtcacttggacagcaaatgatggtggtagaaatcttcaagcacctttagttcttattcctatatcaattcaaacaaaggggtaagtaaattaatccgatctggagaagcacaaattaaccctgtattactctattttttggaaaaagaatatggttatcaaattacttcagagtaattattaaatgtaaatggtgattctgatattccagaaaatgaaataccagatttacaaaatattgctgataaatcagaaatgttgaatcctgttacagaactttacatatttagatatggtagtcctattaagggtaaaaatgtcaacatttcataatatcttccatctaatgaacataactgatttgtgaacacatacaagcttgaagatagcggaatttatctaacattttttcaccccattctttaggaacatatacaagttgtcaaattagataagcgatgagactggcataaatttgtatgccaataccattaacatttttggcttaattgtttattcaaacatcataaatatgaaccccaagatcatcaaataactgagtacagttaaatgctttcggtataaagattgaatattatactcagtaaatacattgtatctgtttgtcagcagtgcagtttagatgacttgtgatacactgatatgtacacagttgtaaagcaatcttaacaaaaagttaaaatttttcttatataagaaatttaaatataaaagttaaaaactttcaaagaataacttatccaaatcttgatatattgtgagtcaagttacaaattgcgtcgtgtgcaattttttatcctgcgctcacccttgagctaaaccacagttaacaaagtttcctccatatctttttctcctatcagggcaagatatcaggaaaggaaaaacgggaatgaaagctatatagcccaaaaacccgaattattccgattttgaggggataactttcaagaatgcctgtaaagttccgaagtttccctaaaactaatcaggtttagtagggttagcataagagatagaaaatgctttgtgtgcgggtaaagaaaaattaaaagcgtgtcacagtacgcctacatataaaagaagatatgcggtaaactacaaccgctgccagctttttgtagcactaataacgctatatccgcccacctccgtgtcttctatataagtttttcttatagttatcatgagaaaacgagaaagaaaaagggcgataagaagttgcacataacgtgatttgatagtaataaagagtgacttcttggaaggaaaatatgtcttacgcgcaaacttcgactcagagcaaatctgggtatcaagctggggtaaaagattacagacttacttattacacacctgattacacacctaaagatacagaccttttagcagcatttcggatgaccccccaacccggagttcctcctgaagaagctggtgcggctgtagctgctgagtcctctactggtacttggacaacagtatggacagacttgttaaccgacctagatcgttacaaaggtcgttgttatgatatcgaaccagttcctggtgaagataaccaatatattgcttacgtagcttatcctttagacttatttgaagaaggttctgtaaccaatatgttgacctctattgtaggtaacgtatttggtttcaaagctttacgtgcattgcgtttagaagacttacgcatccccgtagcttacttgaaaaccttccaaggacctccacacggtattcaagttgagcgcgacaaattgaacaagtatggtcgtcctttgttgggttgtacaattaagcccaaattaggtctatctgctaagaactacggacgtgcagtatacgaatgtttgcgtggtggtttggacttcaccaaagacgacgaaaacatcaactctgctcctttccaacgttggagagaccgtttcttgtttgtagcagaagcgatcaaaaaagcacaagcagaaaccggcgaaatcaaaggtcactacttaaacgtaaccgcgcctacctgcgaagaaatgctcaagcgtgctgagttcgctaaagaactcgaaatgcccatcatcatgcacgactacttgaccgcaggtttcaccgctaacaccaccttggctcgttggtgtcgtgataacggtctgttgttgcacatccaccgcgcgatgcacgctgtaattgaccgtcaaaagaaccacggtatccacttccgtgtattagctaaaaccctgcggatgtccggtggtgaccacatccacactggtactgttgtgggtaaattggaaggtgaacgcggcatcacaatgggcttcgttgacttgctacgtgaaaactatgttgagcaagacaagtctcgtggtatctactttacccaagattgggcttctatgcctggtgtaatggcagttgcttccggtggtatccacgtatggcatatgcccgcattggttgaaatcttcggtgatgactctgtattacaatttggtggtggtacacttggtcacccctggggtaacgctcctggtgcaaccgctaaccgcgtagcattagaagcttgtatccaagcccgtaacgaaggacgcaacttggctcgtgaaggtaacgacattatccgcgaagctgctaagtggtctcctgaactagctgttgcttgcgaactgtggaaagaaatcaagttcgagtttgaagcaatggataccgtctgatgatttaggatttgcgattttggactattagagcaatttaaaatccaaaatccaaaatctaaaatctatggggctgggtcaagcatgaatctcaagcaaattgcaaaagacacagccaaaactctccaaagttatctgacttatcaggcacttatgactgttttggcgcagctaggcgaaactaatcctcctctagcacattggttgcaaaacttttctgccgggaaaattcaagacggagaagcatacatagaggaactgtttctagtaaagtcagatttggctttgcggataatgactgtccgggaacacatagcagaggaagtaaccgatttcttaccggaaatggtgcgtactggcattcaggaagccaatatgaaacagcgtcgccagcatctcgaacgcatcacgcaactagatttatcaagtcccagcccaaaaacagaacagcagaaaatctcagatcctgatttagataatttatctgattaggataggcttaagtgccaaaaaccaaatagtaaaaaatagccacttaactaacaacagctatgcaaactttaccaaaagagcgtcgttacgaaaccctttcctatcttcctcctctgtctgacgcgcaaattgaaaagcaagttcagtacattttaagtcaaggttatatcccagcagttgagtttaacgaaacttctgaacctaccgaacttttctggacaatgtggaagttacctttgtttggtgctaaaaccacccgtgaagtattgagcgaagttcaagcttgtcgttctcagtatggtaactgctatgttcgtgttgttggttttgacaacatcaaacagtgccaagttttaagcttcatcgttcacaaacccagcagatactaaaatctgattcggtttaatgtttcaataatttatacataccctggtgagaggtagagttttctatctctcttttttttgtatcgctcacacggttgtgaacacagatgcaatgatgagttgtattgaaagttcatgttgacttttaccaactttaatggtaaattaagcaaaacaatttatgttttaattgtggtcaaatctacctataaaacttatttaaatacataaaattcagacaaatgtaaactaattttgggtaagtaaagtacccacccaaaatttttgaataattgattttttagaaattaatcaagactaaaaatttactattttagtcagtggcaatgatcacatcagtggctttaattacagcataaacctgactaccttcttgaatttttaggttgtcagccgaagttttagtaatgattgaagttacttcaactccaggagctatttctattattacttcagaattaaccaacccaggtaaaacttttttgacagtgcctttgagtgcattacgggcgctaacttgcatatttttatcttcctgattattgtttataatcaaaccaatagttatcattatctcgtttaattttcgattataattatacttaatatatttttaattttttcatgaattaaaaaatatttggtcttatttaattcatcttattaaatttaggacttacccataagtcacggaagaatgaaccacgttcgcgaagcgtgccgaaggcataggagcgaaggacactaaggaaagagggttggagagatattttgcgtaagtcctgaaattgatggctaatatatcacaacattttgccaatttgctggctaggtacaaatttttctcctcaattttgttgagagattgattgtatatttgtatatatttatgtaaattttctgaaaaaacttaaaaactcaacgggttctcaaacctgttctgcatctagatttgccaatattaacaaaacttcataaagttttgtatttcaatttataaagaaaatatgtggaaaattagatgagagcaaatatcaactatataaacattcataagggagtgaacggttgtcagataggaatatctcaaaatttgacgtaatttaagattctaattatcaagaataatagagattacgtcagtatcttgttcttttcaaaaaggacgacattatatgactaaatcacacctttctccagatgatttgcctacctataaaactacgcaaatcagcgaattattaatgagtcaactggaagaagttactaaaaaacgctttttcctagcgtgtgaaaatacggtgcgcgtcgtcttatccagttgccattggtattttaaggttaatggtggtattttaatattaatgatggtttgtcatgatatcgaaagttaccaaaatatcatgattaatgttccctatttagcagataagttaaagcgttttgctaataaagccaaaattagtattagttcaccagtaaataatggtatcccttgggtaataagtgtagatcaaccttggcctggggaagacgtaaataattcttaaatcagggaacaggtgacaggtgacaggtgacaggtgacagtaagaagaaaatatctcgttcctagtctctggctaggaatgacataacagaggctctgcctctgctttaatagaagtcagagacttatataattcattcccatacagagtatgggaacgagaatttttacttctgccttctgcctcctgcgttctctacgcatccatttctgccaattctaaccagcgttctgtggctacatctatagcttgcttgagtgcttctacctgttcatataaattttgcacttgggtatattttcccggtggcacatttgctaaagccttttctgtttctgctttttctgtttctaattgggcaattttaccttctaactgctcaaattctcgtttttcccagttagataaacgccgacgttttttagtttctgtttctggagttggtgtttttccctcggtggtatttttcgccttttctttactattaactgcttcctgttgtgcagtttcttcagcttttttgtaatctaaataaactgaataattacccggatactgtcgtaaattcccaccttcttctagtgcaaaaatagtatctacagtacgatctaaaaaataccgatcatgggaaactacaattacacagccagaaaaatcttctaaatattcttccaaaactgctaacgtttgcacatccaaatcattagtcggttcatctaaaatcaaaacattcggcgtactaatcagcaagcgtaacaaaaataaacgccgtttctctcccccagaaagtttataaatgggtgcatattgctgatttcctgggaacaaaaaacgctctaacatttgggaagcagtaatttttgtgccatcagcaattttgataaattccccttcttccttaacgtaatcaattacgcgctgattttcattaactgctgatagtaattcttcagaatgttgatcaaaataagcaatatgtattgtactaccaatttctacagtaccgctatctgggggaatgcgtccggtgataatattcattaaagttgattttccagcaccatttccaccaataatcccgattctatcttcgggactaaattcataggtaaaatcattaattaaagttctatcattgtaagctttggtaatgttattgagttcaataacttttttaccaatacgtctgctaactgtagaaatatcaaccttaccctgaacttgtttaaactcagtttcgcgcattgcttgaatacgttgaatccgggctttttgtttggtgcttctggcttttggtcctctctttaaccattctaattctcgacgtaatacaccttgatgtttacgttgactacttacagcagattcttctgctaaggctttcttttctaaataataggaataattaccggaataggtgtaaatgtcacctctatcaatttcgataattctattagtaactttatccaaaaaatagcggtcgtgagtaatgagaaataatgcaccacgaaagcgatttaaatagctttgtaaccattccacagataaagcatccagatggtttgtaggttcatccatcaataatacatctggttcagctaacaaagctgttgctagtgctatccgctttctgtaacctcctgataatgtgccaactttcacatcaaagtcagcaattcctaattttgtgagaataattttcgcattggtttctaattcccatgcaccagtagcatccatctgctgcatgacaagagataagcgagacattaatatagaatcttcgggataatgagctaatttatccgtcagttcttcatattcccgcactaaatttgtatgttcaccactatcagcaaatatctgttctaaaactgtgtgattttcatctaattctggttgttgaggtaagtaaataattttagcaccagagttagttaaaatttgtccgccatcaattgattctatcccagctatcatttttaataatgttgatttgccagaaccattagtaccaattaaaccaactttatcagtggcatcaatgctaaatgtggcatcttttaatatctctttgatcccaaaatcttttttaactgattgtaatgtaataagactcatacaatttggtaatgggtaatgggtaatgggtaattggtaattggtgattggtaattgataattggtaatgggtaattgattactattacccctcttccctgtcacctgtcacctgtcacctgtcacctatccaacaaataaatccaggggtaaatgtccatacatttcatttactccaccttcataataggattgacaagaaactaatacaccgcgatgatgtccggcgtaagaatctaaataacacagtccatttttaccgtttaatttgatataaactggaccttctgggtgaggtaaattatctggtgcttgataaccgaaagcgtgagaataggttttcattgccaaaattccttcttcagctgtatcagcacaaatccctaaaatttggtaatcagactgcttaataagcaaaattattgcctcacgggttaaggctttttctaatggcttgagaactggtgctatatctaagcagttaaatttgttgaggatttttttggcttcggaaatggtgaggttggtgcggttagaagttgacatatagcaattggatgtgtgaatttacttggttagacaggaaaaaggtaaaagttaatagaattatagaagattaaggtatatttcgtgaattgaaaaatcaaatcttcatgctctatattttatatatgtaagtaagtaagtaagcattcagcagtcagtaatcagtaatcagcttttgtttctagtgagactgagttaataaaaaggatgctccagttttgtcaaattccaccagtgttaatgatatcaatttacagcctattatggttttcttcttttttgctcactcctgactcaagagggcaaccacagggggttgcccctactgactccttgcatttttgatacaaatcaagattgatttgatattttacccaagttaaaaataaagggaatactgccttgggaattttcacccataacaagcacatttggcatttgtgcgcctcctgttttccaagcttcaattgcttctttttgtaaaactaattgtcctccttgagctttgagagtttctgctaacagtctttgagcttcggctttacctttagcgcggttaatttcggcttgggcttcttgttcggcttctcttgctatgtagacggctctttgcgctctctgttccgcaatttgtttttcttcaactgctcgcgcaaattctggagaaaaggtcagatcaactacgctcgtatctaatacgattattccatatttatctaagcgatcgcctaatgctgtatcaaaatcttcttttaattcacttcttttggtaattgcttcttctactgtacgttttgctgctgctattttaaatgcttcctgagtctgaggagcaataattttagaaactatattttctaatgtaccttgttttcttctgacttgaactacttgaatcggatcaagacgaaaattaatggcaaatctcgcagttaaattttgcaaatctttggtagaactttctgcgggaacttcaaatttctgcaccgttaaatcatacacatctatcactgagataaatggcggtttaatgtggataccttctgttaacgcaccgtctctagctttacccaagatgctaatcactcccgcttgtccaggattgataatgacaaaggaatttaaccccaaaatcactattattgccgctattattcctataattgaagtctgtaaatttccaagttgttgatttttcaaggttatatctccttttatatactggtttttgagtaaaataacacaaattcagttaattaaaactaatattttcccaagatttagatttttaatgttaatttggctgaaaataacccacctataactatttttaattaggtttctgaaaatacactgctagtaatataattcttctattgctcaggaagccagatatattacctgatttatggtaatattggatgcacgcgactttaaagggctgtggctacagaaatcaaatctcacaaagcatcaagaaagcgtaggcattttgtacatcctctgcaacgtctactggactatggacatgaatatcaacgacaaatttggttagctactggtgcttctatcctcaataaagtttttgacttagcaccaccggctttaattggtattgcggtggatgtggttgtcaaacaacaagattctatcattgctcagttaggtattaaaaatatttctgggcagttcgctattctatcatttctcacggtcgttacttggatcttagaatcattttttgagtatcgctataagttactttggcggaatttggggcagaatattcagcataatttacgtctggatgcttataaacacctacaagacttagaattagcttattttgaagaacgcagtacgggtggtttaatgtctatcctcaatgatgatgttaaccaactagagcgttttttagatgtgggtgcaaatgatattatccaagtgattacaactattgtaattattggcagcgccttttttattttagctcctagtgtagcatggatggctatgttacctatgccctttattctagggggttcggtagcttttcagaaattacttgctccccgctatgctaatgtacgggaaaaggtgggtttacttaatggcagattatctaataatctgagtgggattactactattaaaagttttacatctgaagattatgaagcagcgcggatagaatcggaaagtaatgcttatcgggttagtaacgccaaagcaattgctttttctgccgcttatattcccattattagaatgtttattttagcagcattcacaatattattgatttttgggggaatgcaagtcatagcaggtaatctagccgttggtgcttatagttctttagtgtttttagtacaattgttattgtggcctttaaccagattaggagatacttttgatttatatcaaagggcaatggcttctactaatcgagttatggatttgttagatactccgattgagattcatacaggaaatattaatttaccggtggaattggtgcggggtgcggtagagtttcaaaatgtgacttttgcttataaagatagactaccagtaattaaacatttatctctagaaattcccgccggaaataccattgctattgtgggttcaacagggtcaggaaaaagcaccttagttaaacttttgctgagattttatgaagcccaatatggtaaaattactcttgatggtgtgaatttacaaagtttaaatttacgagatttacgccgttgtattggtttggttagtcaggatgtgtttctgtttcatggtactgtagcggaaaatattgcctatggtacatttgacgcttcccaggaagatattatcatggccgcgaaagtcgcagaagccgatgattttattatgcgtttgccccaaggttatgagacaattgtgggagaacggggacaaaagttatctggtggacagaaacaacgaatagctatagctcgtgcagttttgaaaaatccgccaattttaatcttggatgaagcgacatcggcagtggataatgaaacagaagctgctattcagcgttctttggaaaggataacagttaacaggacaacaattgcgatcgctcaccgtctatctaccatccgcaatgctgattgcatttatgtcatggaacatggacaattagtagaatcaggaactcatgaacaactgttagagaaagatggcgtttacaccaatctctggcgtgtacaatcggggttaagatagattttcaggagtcaggagatcaagaagtcaggagtcaggatttcaaggagtcaggatttcagcattttaataaaaaaatatttatatttatcaccaatcaccaatcaccaattaccaattacccattaccaatcgattatgtttagcagtgcaaaaccagaaacaggggataccaagtggcggagacaattagataaattcgtcaaagaaaatcagcaagaattagctgctttattttggggattgtggttagaaaatggcgatagtccaggaactattggtattgatttacaacctcagccgcattttgtttattgtcctcaagaagcggtagaaaaattaaatgagcgagtggaaaaccgactacaagaacttctaggaattattgataataataaaccagaaacagaagttttaatgattggtatcggtaaaggagaaattaaattaattcagtttgcacctgaaccagcaccgcaaaagtgttttgaacaagttggtaaagatgtagatactttgttggattctttggaacaaaagatgagtgaacagttagtaatttaagaaagcaaaaaatcgcaactttagaaataagaaaataattaaataggagaaaataatgcctagaaaacgtctgactgaattattacaagaagaagctcaaaaatttaccccatctcccgatgaaactgcgattgaagttacagcagaaaaagtcttagatacagaagaaacagcagaaacagcagaaacagaaatttctacatttgaggaaaccacagttaaaacaccctgggaaaccactgctaaacgcgcaaatcctactaaagcagaattagaaattaccatcaagaacctacaggaatctttggaaaaataccaaaatcaagaaactgcactacaaaaagaaatcactgaattaaaaaccgcattatctgaacataaatctttatcagaaaaattaggtaaagaactttatgaaactaaaaaaacagcattaaaattagctgaatctaattctcaacttatagaagaaaataatgaacttaaaaagcaaacagtgaaagaaacagtgaaagaacctgttaaagaaaccgtaaaacaacctgcaaaagaaattactaaatctttagcagttaatcccagaaaatcctacaaaccaccagaaataattgtagaaaaatctaaaccagatacaaaaaaagatgatttctctaataatacttggttgtatgattagagtctaaatcagcattcaggagtcaggagtaagctgttacacagctaaattgtataatcctaatattctgaactcttgtttaacaggcaagatgcctgttccacttatacaaattaaatgcacaacagcttaagaatattagacaaagttgtaaattattcactgctgactgctgatagctattattatttgaattttctttttctcaaaaatattataaatatttttgtaatattgcttctttttgttgtggaataatattcaattcagtttctaagttataaatttcagcttctatattttggatttcagtagcaattttattttgtattgataatgatggtactggaatttctatagatttaagttttgttgcattgatatttgcttgattaatagatttagtagcttgttctttagcaacttgctgaaattgatttgagttcattatgaagttaacaaagaatggattggcttggtttgtatcaattttcaagcgtaccaaataggaagcaaagcaataatcaccttctaaggtgaatattcctgttttacctactaactcaatactattagtacgattaaataatatatcacctggagccagtttaaatttatcaaattcttctggagatatatcaacatatttcatttctccaccatcaaacattttaccttctataatttcattcatacggaaaattttatatcctttgtcttccgtgttcatttgtttcgatattccatattggacgtttaaacataggtttcctattggttttcgggaagagttagatgtatatatttcatctactttaactttcatttgatttttataattttcaatattatctcttaattcttgttctctattttctaatacttcaatttcttgaataatttgttcttgtacttctttagtgggtaaaggtattctatattttgataattcgctttttgaaatttctgggtaagttaatccggttgctaaacttgctatattagcagattcagcttttagaatataatataaatattcataatgaattttactttcatcacaaataaaatttttgtatccttgatttgtgcaagtcacaactttagcaattgtaacatctcctattgttgctctagttgacaatatcacagtgttaataggtaataatttagcactgctgttttctaatcctgtttgagtgatttttctttgagtagaataaagatatttttgcttagtatctaccagtgtagcccaattaatattaccatcccaatactctgatttattagtgctaggagttcctccactttcaatttgtgctacacttcccaatcttactaatggccactttgttataatttggtgcttttttaaaattgataaactaatttgtttttcaaattcaacccttttaaaatcaatacaatcaactaaatcaactagagaaatataatccttaacagcatcagccggattttctatattacctaaaaaagactgataaatataataatttaccttgtcagaattaaatagattatcctcatcatataaagcagttttatctttatcttcaccatctcgataaacaaccattcctgcttgtcttcctttcttaaactcataacctaaaaattctcgattactttgaatatcattagcagatttgacaataataaactcttgttcataactcaataaataataataaaacttttccttttcaataggtaatactttttcataaaataatctttcaattctctcctgttgttcctcttttgttaaagatttgaaatctttacgtttttgtaaatttttaacatctgttaaattgtcaaaccaatgacgataatcttgataccattcagttgctttgatagcatcattactactacgtcccacaaaagttttataatcatcaaaatctaaacctagataatcaacataacttctaaataaagattcactatctataaaatcatggggacgttctctgttattaataatataatcttcagctacataattataatcatgtttccagcgagattcgcgcttttccataaataaaactatagtatttgttcctgtagccataaaagcatttgagcctaattcgactatagctttaatcagaaaattttgtaatatgatctctctagcacgagcataaatacctatattgtttaaaatagaacttggtaaaataatacctgtttttcctcctgtatgtaataattgggcagttctttcaataaataaagcttcaatttctgatgaactatcagttaaagattcaaaaagtgtatatttatcttttaattttaaagcatggggtttaaatccatgaattgaataaggaggattagcaataactacatcataactaggcgcaagttgacgttctctttcgttataatcttctaaaccatcaccaaagaaaatattagcttgtccatctccattcataaaacaagctactttagcagtacgggctaaacgataatctttttcaattccaaaaataaatttttccgcccaatctgatgattcttgatattgtctaatatatctattaatatctttagtaaattcaggtttaattgtatcaacaatattttgtatttcttcaattgcttcaactaaaaaatgaccactaccacaagcatagtcaattaaataaggtaaaaaatctactctttcttgatttaatttagcttctattatttctcgtaaaggaagcgacttaacaataaacttcgcgataggtaatggtgtaaaaaactgaccttcagattgcttataacctgcatctagtaactgttcaaagaaatcccctaaatattgcttttgatatttcaatccattgttatcgttataaaaatatctaaatttcttatattgcagtaaagtaataatttcatttaatactttagcattttccaaaaataatttttcattgtgaacttctttaaaagcaaattcattattactataaaattttaactctcgtaatatctgtttcagtctttcttgtgtggtttgtataggaaaatttctcactaattcatcaatatattgctcagaataatacacaatttcttctttgagaaattctctcattccttttgcatatagtttttgtaacctttcttgtatctgttcaggagtatccttgctttcaataatttgaaagtcagtaatatcattctcatttttttgttcatcaacaatcttacataaaattaaagataaaattcggttaaaagcatttgatttatcactgatattattatgacgtaagatttcttcaaattgattaaataatttacgtccttctccttcagtaaagggttgtaaatcttttttcttaatgggtatatattcaggattataagcttgcacttctggatcaaaaattccattaggtgcaaaatagcagttaaagttttctttccaagttgtatataattcttctgctgttttagcctctttatagctttttatttcttctttgctttctgctaataacctgagtgtttcttctctatccttaatttggataatggcattttcataaacaactaaaccatcatcattaagttgtgaggtatacaagcacaaaaagcgagtatttttatcttgctgtaaataagaaaatagttgtccaccattttcgatcatccgatttttttctttttcatattctttaccccaggttttacattcaatgataattaaagatttttcttctctatcaaaaactgaaatatctgattttccacttttaccagtacgtcctaaaggaaatttacgttccagaactaaatgttgaggttcataacctttttctaataatctatttacgcattctaaaacaacaaaattctctggttgactaaagttagatgtggtttcatcctcaactgtaattttatccccataatcaattttttcagtagcaaaattaactttaattacatagttcttatggttgggataggttttgatgtaattatgctgctgaaaaatatccgcttctttttctataaatcctaaatgagaaataatagcttttatttttgttgtatccatattacttaatgtttattaatacaaaataatgggtgcttatcctcaaatcttaattgatatattctaaaatatgttgtgctgtaatttctgctttttccaagtggggaatatgaccacaatctttaatccaaattagctgactttgggggatagcttttttaaatttgggagcatccttagttcctaaaattttatcactatcaccccataaaattagggttgactgttgaatttttgccaattgcggaaatttaaaagcactgtaaccaccgcttttagtaaaagcaattaaagcttgactccaattaggcatttttaaatgtaaatccccgcaacataaagcatccttattgattaaatcggggtttttataagcactgcgacaaatgcgatcgcgcactttgggattccgtaaaaactccgctgctaaattatataactggggaatcattaatttacttaatgctgaaccacctttcaacccagcactatcaattaatatcaatttttgcaccacttccgggtaagtgagggtaaaatctatcgccgcagcaccacccatagaagcaccaaccaaaatcacagtttggttaatcagggttttccagaaataatagagatgagttttaatagctaagggactataagcaatatccggttgtctatctgtaaaaccaaaacccagtaaatctactgcccaagtttcattgttttcagccagcaggggtaaaagtcggcgatactctaaaatcgaactatcaaaaccatgaaccaataaaattggagtatcgccactaccttgatgtacgtaagtagtggtaataggttcaggacttaaaggagtagcaatgtcttgactttggatactttgagccaaggcaatagaagctggttctgtcagcttgtcaacagcagcgggtaaaaaacttggaaacataaacatcagtttacattatcttgaccaccgactactgacaaaaagaaaatttccccaaatgaaaaaatggggaccaaagcctcgtacaataaatatcacttattctggatttctggagagtcaagccatgccaatggcagttggcgtaatcgaaactttaggttttccctgtgtactcgcagcagcagacgcgatggttaaatctgccgctgtcacaatcgtatattatggcatcgcagaaagcggacgcttgttagtcgccgtcaggggacaggtggcggaagttaaaacagcagttgctgcgggaatagcttctggagaagaagtttatggtggacaagtgatcacacattatatagttcccaatcccccggaaaatgtggaaacgattttacccatccacttcacttccaaatctgaaccttttcggatgttttaagcaaatttgctatcaaaataacttgtagcagataattttattcataaaggagattaataatgtcactacaggccgttggatctttagaaacaaagggttttcccgcagtcctagcagcagcagacgcgatggtaaaagctggacgagttaccttagttggttatatccgagtaggtagcgcccggtttacagtgaatattcgtggtgatgtttctgaagttaaaaccgctatggccgctggtgtggaagcagcagaaaatgtctatggtggtactttagaatcttgggtaatcatcccccgtccccatgaaaacgtcgaagctgttttacctatcgcttataccgaacaagtccagcaatatcgagactctgtagaaaatcccatcgtcagatcatccagcggtagataaatacagggaacaggtgacaggtgacaggtgacaggtgacaggtgacaggaagaaaaagattctcccccaatcctacaccctacaccacacacccgataattgactacggactaatagctatgtattcaaaagcaataaatttttagttctcttactgccatatccagaaataattacttaaactcagtgatctcagtcacagtaaacctataaactatttatagtaatattctgaatactgagattgagtaagagttctgccctgttctgcccttttaccaaaatagctcctgacttttgtaaagaaatgatatttggatacaaaaatctaaagctttgattaattttactcaatagtttccctggggagaaataattgtaattgtgagcatatccaaataatctttgtttttatgaaagatgtgtaaacagcaaaactacttgacttttctgacttgacttttcttattgtctaataaatatcaagactggtaaagaagtgaacgcaaaaataacgagagaaagctgaaacttagacaggttaattttcgtcagagactcataattaatcttttttacctttggaagtaagcattcagccgttagccgtcagccgtcagcaaaagtcacaaagaacacaaatatcagcctgtgaatttctctgctcaaagcctggtaatctagtaaaattatgattttattaacaaccagtctatttacatctgaaagctgattactgattactgatagctgaatacttacctttggactaacaaagtgaaatacctaaactaaaaattcagctttcggatcaaaaatcaatgagcaagattttttgagaagtagtttgcgtattttgagaacaagggcagctattggttagtaatttaagtgggtataggggttgtgatgcaaactttaaagccgagtttcgaggagcgcaatctcactatggaaacggatgcggcacacttagcgcaatattggcaaaagcgactcgctgctgaatgtccagaacaaagtgagggcgctagacatagtattttgctttggcttttgggatcagatgtcaaaagatttgatttactcaccccaaaagaactggaaatagctaaacaagcaatggaatatcgctgtcggattttacagcagcgatacttaggaatggggcgagaacgtgcttatcgtaacctgattaatcgcttgggaagcgtgatgacactgagaaataaaattcaaacttgggtgtctttaagtcgcgatcgccagcgcagtgtggtcgatgtattacaagaagttctccaagaactgctgcaaagtgattcatatatgcagcaacaaatgtctgccattgccgatgtcaccacagatagaagattacaggataccttactatttgccagcatcgaagaatattgtttgcgtccagtacgtaatcaacccctcttggcttatcgttttgttaactacttgcgacgggttcagcgtggtgggctaacccaagttccagctaacgacttgattcgattggtttctgatgaagtgctgacagaagatacagataaccccctgaacttggtagataatcaggcgatcgcccaatatcaagaagcacaaaaattagaagagcaacaatcactacgtcaagctgtatatcaagaatttgcccaatacttactggaaaatctgggacaaaccgcagtagattggctgcaattatacctccaaggcaaaactcaagaagagattgccaaaaaactcaataagccaattaaggaagtataccgactgcgtgaaaaaattagctaccatgctgtccgcgtttttgccatcaaaggtcaatcagaactagtagaaagctggctctcaatttccttacaagaacacaatttcggtttaacaccaaaccaatggcagcagttggaagaaaaagtcactaatctgggcagacagattctccagttacgcagagccggtcactctatagaagcaatagcccaaaatttacaactcaaaacccatcaggttatgggtgaatggactaaagtctatctggccgctcaaactttaagaacaaaagattctctttaaatttcgcaactttggggtgaaatcttcatcaggcataaggcaaggggtatagatttttgttgtttattataccccctttcctcaatctttattcatctaataaacttctcaacatccaagctgttttttcatgcacttgcattctttgagttaacaaatctgcactaggttcgtcattaacttcatctaccaaaggaaagatcgatcttgcagttctgaccacagcttcttgtccttctactaataactggatcatttctttggctttcggcactcctggagtttctggaatggaactgagtttggcgtattcgctataagttcctggtgcgggatagccaagcgcccttattctttcagctattaaatcaactgctaaggctaattctgtatactgggtctcaaacatcaaatgcaatgtttggaacatgggacctgtgacgttccaatgaaaattatgagtttttagatacagtgagtacgtgtcagccaataagcgagacaagccctcagcaattttgcctctactctcctcatcaataccaatatttagatttttgacatttgttgtcgatgacataattttttgctcccaataactagattaaagtgctggttgtgattcgttatttcgctatcctactcgaagcctacacccctatttatgctaggtgcatcttcagcacactcggagtagcttttctgactctagctaaaatcgtttctttgcctagacgctgacaagcttcataacgatggcaaccagaaaagccataatagcttccatctacttctagaacgtctatcggttcttgttgcccaatttctgctattgattccattagttgcttaactttcgctggatcgttctgacgcggtaatgggcgttgaatttgatttaaaggaatttcttgaatttttaccatagaagttttgctgatgagttttctatcttaactaaatcataatcattatgacttcgatttgcaactatttgagaaaaaaaaggtaatgatatgattgaatggcatcaacaacaaagcaaaatcgctacaaaattccttaaaatttgccttaaagcctcactgtggtagcaaaatcaggttttcatgaaaatctttttctggcgttcttcctacaaaatactcaccacattctgtttactgggactgactgctgcatcaactcctgtcaacaataacccagatgtggaactgaaaattggtattgtccagcgatttggatctacacctactgctaaattaaaattgacaccgaccaaaggcgatcgcctaaagctaaaatggcaacaaggtcatcaacagcaaaccctagttactgccaaccccatccaactggaaaccgtcatggagactttgcctcaagcaaaagtgcaggaggtattagttttaggcaactatcgcacctttgaaacagcagaagacagcgccagaaattggcgttctcaaggtgtagaagtggaaatagctcaacccgaacgctggcaagtatgggcaaaacgagaagtttacagcagccctttattacggcgtttgttgttacagaacatacaagcatcaggacagacactaccatatttagatacacaaattctgcaacaaataccgcgagtcggttgggaaattaacggtaagcgatacagcaataattatttagaaattaccacagataaaaatttaattcggttgaatacaggcacaaagcctgaaaatgctcgtcttttcccagggagattgaaattacagcccaatgcttatggtagctactccttagtcaatcaagttcctttagaaacatatttacggggagttttaccttatgaaattggcacaagagcgccccaagcgtccctagaagctcaggctataattgcccgcacctatgccctgcggaatgtacgcagatttgaagttgataactatcaattatgtgcggatacacactgccaggtttatgatggactaaatggcgtggcaaaaaccacagatcaagcgatcgctgccaccaggggcatggtattaacccataataacgaattagtcgatgccctctattcttcaaccacaggtggagttacagcttactttagcgatgtgtggaatggagaagatcgtccttatttgcgtccagtagtggatgcagctacaaatatttgggacatatcaaaaaataatttagcagatgaaaataatttacggcagtttattaacctgaaacaaggatttaatgaaagtaaatgggatgtattccgctggagcaaacaaactagcttagaagatattaccaaagacttacaaaaatttttgcgggcaaaaaagagtccatatagcaaattcaaaaccattgaagctatggctgttaccaagcgcagcaacagcggtagaattttagaactagctgtaaaaaccgatattggcgttttcaccttacataaagatgaagttcgcagcgcctttgcggctccccgcagtacactattttatttacaacctctcaacaaaggtacaccagggatctggggatacgcttttattggtggaggtttaggccatggagtagggttaagtcaaacaggcgctcaaaatttagccaaactcggctggccaagtgctaaaattcttcagttttattatccgggtacagaacttaaaatacttggtaacgaaattcaacctttcttaacatcttcagatagcaaaacaggtagataattgcggtaagctagaaataacaagagaagaaattgatacaaaacatccaccgctgtactgctgtaacagtaaggcggtggtaagttctcaaaaaagtaaagttcgacttttagtaaagttcttcttctttgtgtgtttggattgtacagtcagaagttgggtatgcaacacaagtcaaaacatatccagcttcgatttgatcatcatctaagaaagattgatcagactgatcaattgaaccagaaacgattttacctgcacaggtagagcaagcaccagcgcggcaggagtagggaagatcaagacctgcttcttcagcagcgtctagaatatattcgtcgtctttaacgttaatttcgttagttgtaccttcagcttcgttgattaaagtgactttgtaagtagccatttagtattcctctcttgtaacaacggcagtataagctatatttcagcaaaatcggcggctgacctgaaaggatgaaccgttgatttttatttgcttcaattctgatactacgggaaaatctcaaccttgtaacggaaatttgaccacgattagtaatgaaatttagttacttattaccaataagttttagttatgtaaaatcatcattgcgacagatggcgacgacatctttgagggtatgatttttgtggttgcactggggactggggactagggactagggactgggtaatcaat

SEQ ID NO: 57 - DNA, 34602 bp, Sphaerospermopsis sp. LEGE 00249
  LEGE00249_72
aggacaggctcaggacaggctcaggacaggctcaggacaggctcaggacaggctcaggacaggctcaggacaggctcaggacaggctcaggacaggctcaggacaggctcaggacaggctcaggacaggctcaggacaagtcgctcagtacaagctaactaactgctcagtacaagtcttgcctgttcatattgtacctcatgtagatggaatgtgctgtatctctccggtaattgaatatgggtgatttgaaaccctttctagaataccgattcattaatcgtaagggcgtatagcattcggacggaatatgaactggtttcagcgataggttatcacccgaatgcttcgcccctacaacatattacaaattaatacattctatttgggagaggtctaatatatctagcttttgtctttattcagcaagccctaattattgatttattatttatttatttataacgtttcccagtctcatgaggtacaccctaatttatttactgttcccaattcccaattcccaattcccaattcccaattcccaattcccaattcccaattcccaattccctaagataaaaaactctgtacctcactagcttggtaaatgctatatttatttattttgcttgagattctaaccattgattaaaaagtgcgatcgcctcttggattttgacgataattatttctgtttgttgggctaattctaatactctttcttttcgcaattgcaaattataattatgacgtgctaaatgtctaaatttccgataatcatttaattgtaataatagtgaaccttgccagacaggaggacgattttccccaccaatttctgccatttgtaacaatagttgttcatgccaattttcggcttttggcattccctcatctaaagtaacagcaattctttcactaattcgctcacaggctgtgtaaaaatcacaaatatagctagataacgcaggagtgagagcaatttctggaatactttctgcttgagcaattaattgctttaaagcttgaaaattctgctctaaagccatcatctcgtcttcaatgcgagtttttaaggctaaatatttattagttggcatgagtttttctttgagaatccgagaacggacaaaatctggtagttcttctaatgctaccaaatctatttttaaccaattaggtgcgattttttctagaagagaatatgcctcccattgttgcttttccgacattcctgtcactgctaaatctaaatcagattgccaatgccaagggctttctcctgataaagaaccaaataatattacttcttttgctcccttttctatgagaatttgctgacattttgcggctgtttgtaatgcttcttgttttctttgttctagagtttgattgctgttttctgtataaatgttcttcatatacagcacattccatctacatgaacattaaagctgaactaggctattagccaagaaaattattacctggcttgcttgtttaaattcctttaaatttcatctaaattcactcccaaagctcgcagtttttccgctagtttgtctgctcgttgtttttctttttctgctcgttgtttttcttgttctgctcgttgtttttcctgttgtgcgctttcagcaaaagtaggaatccaatcaccatcctcattataccaacgtagccacaaaccttctgtaccttgatattttcctgaccaaacccctactcctaattgcaattcaggaaaccagaattttggttctaccagttccactgcttgatattttatgcccatgagttgaaatactcggaggcgattttcatatctatcgaaaataacatagtagggcgatcgcaaatactgttcataagcttgccattttgtcggtggtttattcgcgcttcttgatgtttgtcctaaatcttctgcttctgtacctggtgataataattctacgattaaaaatggcgctagtccttcttgccaaatgacataactccagcgcatatcctcttgtgtttctgaaacgggtacacctaacactaaaaaccaatctggtcttttataccatgcaaaatggcgcacatcataatataagtttaaatccgtaccaatgaacatttcttcctggggataaacaggagattggcaggtttcccgtaataattgtggttgaaagtcatgaaattcgtctggcaaccctggttcctctggattttcactaggtaaatcatgcatcgtcggcaaagtttcccagggtggacggggatgaatggtggactctaattcttcctcattgtcaccctcactgggtaaatcatacatggtgggcaggtttttttgcgggggtgcttcactttgatacatgattcattacctcctgtgtttcattatacagcatttttcgttatgatgaggtacagatattaattattaatgataaaacccttatatcacaggcatacttcgacaagctcagtacaagttttgcctgttcatattgtacctcatgtagatggaatgtgctgtatctctccggtaattgaatgtgggtaatttgaaaccctttctagaacaccgattcattaatcgtaagggcgtatagcattcggacggaatatgaattggtttcagcgataggttatcacccgaatgcttcgcccctacaaggtaaaaacaaattacctagcattactgaatcgacgttctagggacaattcatgaattgtccctacatgaattgtacctacattcattttcaccagatgtctaataaacatctccggtaattaatggttgtagagaggttgcatgcaacgtctccacaagcttctggaagtccccatggggagtgtcaagcagatttactcagcagtttggatgataactgtggagagtaatattcaggaaccaggaccttgagcagagataagagagtatctctgtcttcttcttgggctgctaagaaaagctgatacagatatggctctagctttgtccaaggtatcattgcttcctgggcggagtaaattttcggatgtatagtttttttaacattctcttcttcaatcaacaactcttcatagagcttctctcctggacgcaaacctgtgattttaatctcaatgtccttccctaaaactagaccactgagttctaccatttgcaccgccagatcgtaaatttttaccggttcccccatatccaagaggaaaacctctcccccctcaccgagagcgccagcttgaatgaccaggcgagctgcttcgggaatggacataaaatagcgagtaatttcgggatgggtaatagtaatcggttgtcgctgtaaaatctgttgttgaaatcggggtactactgaacccgtgctatttaacacattaccaaacctgaccatgagcaaacgggtgtaggtatccggctgttttgataaagcttgcaaaatcaactcagccactcgtttggttgttcccatcacactggtgggtcgtacagccttatcggtggaaattaagacaaaagtctcaactttacactcattggccgtgcgcgtagctactagtgtaccgtaaatattgttaatcaccccttgggcagggttcatttctactaaaggaacgtgcttgtaagccgcagcatgatataaagtatcaatattatattctgtaattacctgtttcaggcgttgggcatcagttactgagcctaaacaagcagaacaagacaagttagggtaggtttctcgtaactctatttcaatgttatatagtgcaaattcatttaattcatatagaactaggtggcggggttgttgttgagcaatttgacgacagagttctgaaccaatagaaccacccgctcctgtgactaaaacagatttatttgtgatgttgacttgcagtaacttgggatctgggagaacttcttctcgtcctaaaatatcgcctatattgatttcccggagttgagcaatggagactttacctgatatgatttctgctagagtgggtactgttttcacttttatatctagagctttaagttccgcaacaatttcttgctttcttttgggcgttgctgatggaattgctaagagtactagctgtacctggtacttgttaattagatattccaacttctcagggctataaacctgaatgccattaatcgtatgtttccatagttgtgaattgtcgtccacaaaggctataatctcaaagttgttatccaaaacaagtgcttgggatagttgaaatccagcttgtccggctccatagataattattggttgcaggagttgcttgctatctgctacactactaatgggttgagatgggaattttaatctcaggggggaactcaaaccatataacacccatcggcctatgagtctgactgtgactattaaaattagtgtgattaaagtatctactatctgaacagaaataggtaggaaattgaaccggaaaaccaaatccaggatgatcaatcctccttgtcccaacataactgatttgaaggctgtgtataaaaaggcaaattcactgtattttagtacatttttgtacattcccagtagggaaaataacaggatttttccgggaatcagcggaataatagaagggagatatttacccagtatatccaaaggaaataaactgtgggaatctatggaaaatgcaatataaattgccaataaaaatagtagagagtcagttaaatacagaatcagatgcttttttgttcttgatgaagtttggagaaaatgggtaatatttttgataaaaacagtttttttcaaaagactaagcagaaaatatgttattcgcatagttatggatgggaaagtgtgatcaaacagtttagaattaaatttgtcacaaactaagcattaataatagaactctggtgataccatttctgtatgaagatgcaataatcagagtaggggcaattcatgaattgcccctacggaaatatagcgcaacctcacatagaattggtatgaaaatcaatagacatccccagaaaagaaattatggaacctatttatgggggctgggcgaagcttatgggatatctagatgtctgatttttccgttaaattaacgcccataagcttcgcccctacaacttatgacaaattaatacattctattgtggagatatctcatgaaatccccgacttttcggaacacttgtacattaccaaaagtcggggatgtttggggtatatttttagtaaattgacttagtaaattgacaaatttatgatctactattccctgtcgccgattgcaagcggggattgaaactggctccggtgcgcccggtaactagccaaaccactgagcgccctatgtccctagcaatacgtgttcgagcttctctctgagagctttgggagggtacggggacaggagtaaaggcgattccctgactaccaaagacaatagtggcgatcgcctgggagcggggcatatggtagtctgaggtgacgagatagacgtggcgaatattgttttgttgcaaaggtgcaaccatggtggtaaaattagtaactgtatctgtagcgcgattgtcgtactggatgcgatcgcctccctgtagcttttggttgtgaaggtcacctaagatgcggcggatttccggttcgcccacggaaacccaaatgggaaggtcagggaatttttgagccatttctcgggtgaatttggctctgctgtcttccccactgagcatcaaaatggcttggggttggggattttgttgacgtgctatagctagacgcagggggatagcagtggctattgtgaacattcccaagcaaccagctagggttaataagcgcagaggtttgaccatatccgtggataatatttaagctatatgcctatgttagaggcaaatttttcatctgagacgattttccccagatatccggttatctcacctttacttaagatatttatgggggcagggcgaagcttatgggatatctagatgtctgatttttcccttaaattatcgcccaaatgcttcgcccctacaacatcctacaaactccagtaatttgtggtatttatcaaaatttttgtataacagtatcgatcgcccccaggttatttttaaaggcgatcgcaccagcactgctatatttggtagtatattcctattgttcttgatgtgtaccatttaaccaagcttctaggtcagcaatggtggtaaagtctaggagggcttctcctagtgactccagttgattcaggtctaaggaacggatttgagcttcttggttgagggacaatactccacagcgacggtttaatagacggataattagctgggcttcaccctcttgtctaccttcggctttaccttcttgtctaccctccttagctcccagttgaaacacatcccgatagaatcttgtctgggtaatatctgctgttttcaggtctaacagagttaggaatatacggtaaaatagcttatctgttttcatcttttttcagagccgcgatcgcaccagcaatagtattagtataggtaggcgatcgcctgtttactcatatttggttggtactgttaagttataagtttttaagttataagttttaagtcccaacgggcattcaatattcaatatacatgctcacgagagatgacaatttctgtagctcccggtggaggaaaaggataaagctctgtttgtctagaggcaatttgaataagttgcctgtctacctgcaaatttactaaaattttggtaacttctcttagtgctaatctgcgagagaatatgctcatgacagtaattagaatcagttttatatccaatataaatgactgattttctatataaatcaagcttaatctactcttccaaggacgaactagctgattataggcaatgtcaggatctgagtggtttctcagtatttcacccaaatcggagaaaactattgaggatatatctgtaataccaggcttcacggaaagtaatttcatttctgtgcttgtgtacaggctcacttctcgtcgcacattcgggcgtggacctactaagctcatctcccctttgaggacattccaaagttgagatagttcatccaacttatacctgcggataaagtgaccaacccgcgtaattctcggatcattagctgaagttgaatcaacccctatacgatcagcattaacaatcattgatcgcaatttgagcatctgaaaaggcttacctttgagaccaattctagttgctacatacaagggagaacaaaagtcctgcaaccaaatcagagtacctacaatcaggaaaacgggaaaacacagaagtaatccgattgtagatgcaactgtgtcaaacaatcttttcatatgtttttatttttgtttatcggttgaatttaatctcataagaagtttgttatatatgtgttcagcactcattttgtattgcgatcgcaaataatcttgactgcccacaagagacgaaaaacagtctggtaaacctattctgcaaaaaatctggggaataataccgttttccaaacaaacttccgctactgctccccctaagccaccttgaatggtattttcttcaattgttacaatacctcctgtgtttttaactgcatcaaatatgacttctttatccagtggtttcagtgtatgtaaactgataacgcgagactctattcctttttctgccaatagttttgcagctttcaaggtttcattgaggataccaccaatactaatcaatgtgatgtcactaccatcacgcaacttcctagctttacctagtgtaaatacttcttcatgttgattagtcattcctgcgctgcttttatcaagtcgcaggtaacatgtgccttgggtattggctaaggatgaagtagcttcagatgcctcccagtcatcaccgggagcaactattgttatatctggtaaggctctgagaatgctcaaatcttcagtagcatgatgagaaattcccaatgcaccatagctaaagccgccacccatacaaacaattttcacattggcgttgtgataacaagcatcattgcgaatttgttctaaacaacgcagtgtagggaaattggcaagggaataggtaaagggtattcgtccttccaacgctaaccccgtcgctaaacctgttaagttttgttctgctacgcccacattgagaaattgtttggggtaacgttgagcaaatttctcaaagactccaaaaccaagatcaccagtgagtagcattattcttggatcagactccgctaattccaacaaacgctggataaaagcatttctcatagttgtgagttcaactcctgtagagctttttcatattcttctccttgggcggaacgataatgccaaagtacagaatcttccataaaggaaactcctttccctttagtggtgtgggcaatgatgcaattaggtttgccaagctcaaagggaatttgtaagcaagccgattgaattgctgaatgatcatgtccgtcaatttcttgaacggcccacccaaaactacgccatttgtcagcaaagggttctaagttaagggtttctttgatggttgtaatactttgaagcttattgtaatctatgattgcaactaagttatcaagatgatgatgagcggcaaaaagaatcgcttcccagttagatccctcatcacactctccatcactgagtaagacaaaaaccctatggctgaggtcatcaagtttagccccataggccattcccgcaccgacaggaagtccatgtcccaaggaaccggtggaaaactcaacaccgggaatacccttatgagaaacatgaccactaaggtcagaaccatcttgataatgagtgtttagtttctcaacagggaaaaagccccgttctgctagaactgcgtacactcctgctccggcatggcctttgctaagtataaaacgatctcttgctgaccaagttgggttctgagggtcaacctgaagaatttccccatataagaccgcaagaatatcagctatggagaatacagaaccaatatgggagctttttcctaaactggtcattctcagtgcgtgtttacggatttgctgtgctagtttttcacttctcacttttctaatagttttgattggaattaaggtattcttgatcttgttctgagagatgccaaccaaaggcagcaatgttcatctcagtttgctcaggagttttagcaccaacaatggcagcggacacactaggttggtcaagaagccagcgaatggcaacctgtgatacttttttgttatgaatttcacttaatttgtttaacttgtcaataattgacaagttttttgctaaattatctggttggaaatggggtaaacgatgccgacgatcatcttgactgaattttgtatttacatcatacttacccgtaagtaggccttgtgccagtgaaccgtaggcaaagacgttaatgtgttctgtaaggcagtaaggaagtagttctatttctgagctacggtcaaccaagttgtattgcagttcaacaaagggtattttatgccagctatgagcttgctttaacaatggcaggggaaaattagaaactccaaaatgttggattttgcccatgtcttgacatttacacagtgcttctatggtttcttcaatgggagtgttgggatcaggccaatgaattaaatagataggaatgcagtcaagttttagccgcctcaaactattttccaatgcagtgatgactctatgggggctggagtcaagaaaagtatgagcgcgattttttcctagggaaggttgccaattaactccaaacttagagataataacgacctcatgtcttttagctcccaaaatttctgctagtctttcttccgcccgacctaaaccatagacatcggcaacatcaaagcagttaatacctaagtccaaggctttagtcacggcttgctctagttgttgctcatcaacttttccccagtcagtccccccaaggggttcacaaccaaaaatgattcgggaaatcatcatttctgtgccaaataggcttaccaaatccatgggcaacacttttgtgagtttagttgtttagttgtaacttttttggggtggttcacagcacaaatctcagtacattagtctagaggaaagttcatattcttgaccaggataaaattagaaccagacccctgcattttagtttcctgttgaagcttaatctgaccaaatctcactgagaggtcagaaaatgaagataaggaaatcactgaaccaccggatatttcgtaaatagcatcggcatcaagggatttcaaatcatcaagatattcctcctcactgattccagcagattcaattaaataagggcaatgctcaaagaacaaaataaaaccttttgcacttgatagtataagcttcattcctttgattgcacgaggttcattaccttgaatgtccattttgataacaaacattgattcataatcaacacctgttgatcgcaataaactatcaaggctcatactgctaacttgatatgaattctggactctgattggtgcagtagtaaccttatgagtcctattatcagcggaagatcttgcattaataaaaattgtttctgtactagaagagtcaccaataatcaagttgtgtacatcaacaccgacaaattgatttgtagtaagcgactttttaagagcattataaggccttaaatctggttcaattgctattattttttttatcaagccaaatcgatataagtctgctgctgcaagacaaaaagctccgtagttagcaccaacatcaattacataagtccctttgttgtaaattattgcctttaagaaagctgttatttcagtaagttcatacctttctctatcggtaaaatatttgaaggaagcattatcacggtagtctagtatcatataatatccactaatatatatactattaccaaaaggcaacataaaaatcttaattggaaaagtcaaagtcgcaattatatcacgtaaccagaaaggcgactgtcggtacaaagaaaataaatgttttatcattcctggactcctaatcggttttctaccttctaaatctaaataaccagtataatgagttgattacttctcgaaccatactcctcctcgtccatcggctttgaggggattagtaatattgtgaacagagcgaaattcatcaacagctttacgggaaccaaaacaggtagcataatcatcgacaatgatcaaaccgccagtaaccacaaggtcataaaagttttctagaggtactttggttgactcataccagtccccatctagtcgtaaaactgctatttcacccacttgctggcgataggctggaacagtatcttgaaaccaccctttaaccagatgagtttctgcttgaggaaagcccagtttgtcaaacataagttcactgacttgttctatagttcctaaacaggagcctttggggaggggacggataaagttacccgctttacctccttcgtaatcttcagcagtgggttctggtaagccttcgtaggagtcaaataaccatttttgtcgcgtctgttgacccagtaatctattagttaaagccatcattgccgatgttccaccctgggcaacgccacactctacaattgccccgggtagatttctcaattcagctaatgcagttacttcaaaagcattttctaaagccttactaccgcccattgtgtagggtaagagtttccaagtcagagatgttttcatcctgagagatttatctccataaatacgagcggcgaaagctttaactccataaagatagcgaagcaaaacttgataagtgcggtagagaaaatcgtagactaacttatagatactagcaggtaagattttagccaaaataggaattatcaatttagctattttagccacaagagatggattgtaattaatggtagagaggttagagatatgggagttcggcatatgtatcactgatgtaacttctactaattttctgatgaaacaaagctttctaggtattcagccaattgattgtaaacaactttggcatcaaacaagtttttaaatgtcgcgatggaattttgtttcattgtttctaaacgttcgcggttttttgataattgatcgagttcataagctagcaattctggagaattatgatagctaaaaccacattcatattcatgaatgatatcataaagactaccgttctccagacttaatgctattgccaaaccaccagacatatattcacctggtttatttccaggagtatcaacatagttaatggagttaatgtagggagcaagtccaatatctgctatttttaatagggtgataatttcatgtttatcaatccaacctgtaaagtgaatattactgagattggcagcctgattttgccaaaatgtaagctttactccagaaccacaaataatgaattttgcgtttgactttttctcttgtaatattttggctgcctctattattggaattagatcaaaagattgacccagcgtacccaaaaaaattaccaaaacacaatcgtcattcttctcaatttcctgactttgccaaaaattataagaaaattcttcctgtttctctgttaattccttttccgaccaataacccatcctaaacaccctatcatttgtatttctagatcggtcagcatgagcaattccccaatcgacaaaagcatcagtcaaaccaacaatacccgttgcatgactacaggcttgttttaattgccacaccatgggaataaaagctagactcagcagagacctgaggtaagttgggaaaaagtcgtaaattacgtctggccataaatcacgaatatcgagaacaactggaataccgaactttaaaccgtactggactgcttccctagccaattctatagttggaacagaagccagaattatatctggtttatcagtgtctttataagcaagtaatttaaaccttcttgccatcaaaatgttgtctattatcctggatatggaaaggtttttttgataaccaaaacctcggacatattggatatgatagttattcgacacttctacacgagtatctgttttatatctatggcaatgcttaaaatgattaaaagttgatgtccaccatataactgtatggccgcgttcagctagcaccttggcaatcatacctgttctcataattctagcatcgccaaggccatcatgaggtgtagattcggaacgttgaataagccaaattttcataaattaagtttaagagattcttgctatgtgatttatacttgcttattacttataataaaataaggaagaagctaaaaataagcaatgatccatgctgatgtaatactaagtatctctgtatctttttgggaaaagaaagagtctaaagtgatttcattgagagaactcctggcatccaaactttcatttacttcatctaataaaattgaagtgtctaagtctacaaacaattttctaaaatcatcgtggcgtaatctattcatatacatatatctattaccggcaattctattccattcactatccgaaaattgcaaaaagttaatagcagaaatggatttatctgaatgggaaaagtgatcgctgtaatctattttgtgtacaaacagcccattactatttaatactcttttaccctccttaataattgccttaattatttctgggggaatatgctcaaagacagtataggatgtgtgaaagtcaatagagtttgagggtatgctcagttgggaagcgtcccccggtgcgatataatcaacattaataaattttaataaatcatgcaaattgaagggggattgagtgaattcaatcagaagatttaagcgattattgacaatacggttctcaaacaaatcttcaatttgagtagcatgatttttgatatattctaaatctgctttaacaagttcctcttttaaataagggtttaaatcgacagtaataattttttctgctcctaacagccaaaatgctagaggagtattaattctccttcctgtacctacctctaaaaatgtagcccctacaggtgattgaccgacattttcaatgtgtttacacgtttccattcccgcttgtagtctgctcatgggattaagcttattcttttttaaagagccaaagtttctttgtatccagtaataggtagaataggagatatttggggggagaagactgactagattctgtattttggcttttaatttccagttcataattaggttagaattgtataaactaattggttaactgaggtaagactaggtaaaaattaaattgtaaaagttacatcttttgactgagtatttctactattttgtagctggagttaccactcccataaagttcttgggaataatcaaattcagagttataaatatgtttttcggcatctataatcttctcaaaactagcccctgttaatatattcacaccacctttcactaattccacccattcggtctcctcgcgtaaagtaacacagggcttacagaaaaaatatgcttctttttgcactccaccgctatcagtaaaaactccctgacaatgacttaacaaagtaatcatatcaaaataacctacaggctgtagaaaccgaatatgattaaattgtgtgtgttctaataacttgcgggttcggggatgcaaagggagaaccacaggagttgtttgagaaatcaagtttaaagcttgcagaatatgctcaagacgatcagggttatctgtattttccgctctgtgaatcgtagctagataaaattgactctttagttcactgattaactggttggtggcattggtggctggggcaatattccggtaaaatagagcagcatcatacatgacatccccaacatgacacacccgggttgaactactgtcaacaataccttcctgtgctaaattggcaatggcggtgtgggtgggacaaaataaccaatgagaaatgtgatcagtaagaactcgattaatttcttctggcatttggcgattgaaggaacgtaaccccgcttccacatgagctacaggaatatggagtttagccgctgccaatgccccagctaaggtggagttagtgtcaccatatactagaactacatcgggggtttccttcaccatgacttgctcaatttttgagagcatttgaccggtcattgcgccgtgggaacccccgccaattcccagatgatattggggtgagggaatttgcatttcggtgaaaaagacatcagacatattaaagtcgtaatgttgaccggtatggactagtatttcttgaatatgggagtctgcatattccttaatggcacgggagaccgttgcggctttgataaattgcggtctagctcccacaatggtcaaaattttcatagctgtgttggtaaaagctcttggtaaagggatagtagtttttgagattcctgctcccagttatatttattttccactgcttcgcgtccatttttccccatttctgccgccgcttggggatgattgattaaatattggatagctgcgctaatttcttggggattgaggggatcaacacaaatcccacagttattaccttcaataatttcccgccagaggggaaagttagaggcaatgactggaatcccggctgacatgtactcaaacattttattaggctgtgcatccacatgattgggtgctggatgaaaaagaactaaaccagctactgagcgagataaaacattagcaacctcttgcctgtttaattggcctagtgatcgaacattttgccatccagttaaagactctgccttagctttttcacctgcattgctaaaggttcctcccaatagtaaggtggcatttgtcataccaatagcttgcaccatttccaagattcctcgaatttggcaaataccccccacgtaacaaacgcttttttccttttccggtgaagacgattctggtgtcactaattctgttaatatagggtagttattaatgtcaatagttaagggatttaactttaaaaatcgctgccgaataaatggtgtagcggtaacaatggcatcaaacttgggggcagcgaaattttccagtttttcaattacccagctaattgtaaatctgatcagatgaggtatataatctttacccaaggtttgacgggggacatcctcatggacatcataaataacttttttaccttgcaacttgaggagtaacccaacgggaattaattcaggatcgtggaaatgatatatctgggcattaacttttaaggctgcgcgatagacatcataaactgtttttgtaaatcgtaagatgcgactacctttcagttttgttactcctcttaaattaactgagtttttaatttcattaggagcattgggagccactaaatacactgtatagtttttagataaagattcgcattcttttaagaagatgcgagtatcttgccacaggtgaacggatgtcatctgacagattattgctgaggtgagattgttcatgtattattaaatttcttattttaagaataagcacctgattttttacccgttgatttttcaacaaatttctgaatatttttgatgattctttgatataaatcccaattattaaaatctgtgtaatgacgattgggaaggatcattaattgattaaaatcatcacgaggaatccgcagttttttacaaaagaaagtaatatcagtttctaattcatctggatgatatagaggctcctctaatttagacaaagcatccgacctagacatttgtccagagacaatcaaactagaaagatgagggcggcgtttatcatagccaaacttcacaggtaaataatagttttggaagaacttagtaaataaagactcaccatgctttctcccgtaagcacgccagccaattttttcctgcaattccacaattgcttttcctttgtgataaggaagataatttaacgggcgtacaacctgcatctttttaataaatggataccccaagtaataatcaaaaaaactaattgtgtgataattcttcaggggtatctgtccaaatctttgatgtattgaccgcagattaatactatccatagctgaaccatgccaagctttgggaaaaattgcctctgtggcaatattaccgccgcttaagacatagcgaatgtcattctggacggcaaaatgatacatattggcgaaaaaagcatgatcttgggggacatcttgatttgatattgccgacttgagataggctaattgtaaatcccgcatttcttcccaatcaatgacatgggtgtatagatcatagttgcaatacttgacgatggcttcaatatttgccactgctaattcactattccaacctgcatcaacgtgaaccactaggggacgtaaaccccattcatgaaccttaagggcaagatatgaactgtctacacccccactcaaacctaaaatacagtcataggagcgcccttgtccaaaggttttgattttttgaaaaatctgctgtaatttctgattcccttcctcgttaggaaaccagtttggcttagttacctgctcaaaatcatgacagtgattacacactccttggtcatcaaaggtgatttctgggtcagtggtatccatgacacaacgagtacaaatttcgtaggctctcaccataaattttattatttaaagttattattgtaagtcaactcagttaaaaagtgagtaaattaaccaattgggtatattgaggataggtgatcaatacagcccgatggggaccgtgaaacacaaagaatgagccagcagctacagcactcgcccctgctttgacggcggattgaatgtcagttagactaccaacacccccgatggcaattaggggaacggtgcagaccgatgctgctgttgcaatcagttgcaagtccatcccggtcatggcaccatctttgtctacggaatttagcaaaatttcccctgctccagcttgagtggcttggcggaggaaatctaaccaatccatgctgataatttttccttgggtggaactatacagcttatactgtcccaggagattttttttgatgtcaatggatactactacactttggttaccaaatctagatgtaatctccctgactaagttacaatcactaataatactggtttgtaaactaattttctctaccccagcagcaaataaacgctgggcttgctcaacagttttaatacctcccccatagcacaggggcataaaacattccccagcaaattcctctatgagttgatagttgggttcttgtcccagtttactggcttgaatatcaataactattaactcatctacctctttctcgttgaaaatacggatcgcattgatcggatcaccaacatatttagggttagagaatttttgagtcttgactaagccattattttgcaatagaaggcaaggaataactcgatgttttaacatgatgtggttacatctctacaaagtttttcattaatcccatcccaaaacgatggcttttttctgggtgaaattgtactccatagatgttaccatcggcataacttgatgggaaggcatagccatactcagtatatgtgaggatgtctgtttctctactacacactgcatgataggaatgagtgaaataaaaacgctgttcctcctggttatctacgagcaggggggtagtttttttcactttgatgatattccagcctacatgggggactggcaattgacaggggttgggaaatgaaaatcggtgaaattcggcattaattaaacccagtcctggtaaattaccttcttcactcccccgggatagtagctgcattcctagacatatacctagtaatgggattccacccagggcttggtcttgaattaagctcaacaggtcaagtgatttgagttgattaattccgtggtcgaaagctcccactccgggaagaatcagttttgatgccttgaggatgtcttctttttggtgggagatgatggcttgtccacctactttacgaatcatgttccacactgaggcaatatttcctaagcctgagttaatgatgacaatcatgttctaaatttacttaaatgatgtattgctgatatgccgccagcatcaccttttcttgctcttcccagcaaaactcctggctggtcttggttaactgatttttcaaatagtctctatccatggatgctaatttgctgagggcatttaagaatgattctctactcccatcttccataactactcctacttgactagaggatactacttccctcatctctggtaagttagataccatcacgggaatttgtgccatgatgtaatcttaacgatttggatggcacaaggagagccgaaaaatatacaagaatccaagatgcgcccaatgaaccagttgtcatatgattcattaatatgaaaaaaaagataaaaaagataaatttttcttccaaactaagcccaaaaactttttcaaatttctttcttgctcgaagtatatacaaaacaggagtaaaaaagaaaataaaaccaatgattccatattcacacaatagttctaaaataatgttgtgtggatacataatttgttttgcatcatagtatcccatataagctgaaaaactatttattccacctccaaaaagaacagaaaaagcgttttcaataaataagttccaagcagtgctaaacaataacagcctcatggaggaatcactttctgtatcacttaatatcagtagcctttgaatagttggaaggtttaccgttaaatcagtaggcaacaatggtattacaatgatattgagaaaaaagatcaagaaaatgataaaaaataaaataataagtgctttttttatccttctgagcgagtacaataatttagcaaaatatcgaatcaataatattgaaaatactactagtaaagatactaaagaagatctgccaccagtcaataacattccaaatactgtaagtataacagacataattgcaacaagtttaagtattcttctttttgaagataaaactaaatataaccccgacaaattattgataccaagatacatatttgtattttggtatccgtaattattctcatttatttgagaggactggtaaaaaatagattggaaagagtttgagctaagagacaaggtaccatttatcaatgcaatagctaagaatatcgtatatacaaatgagactgcgtataaaattaataaaattttatttttgttatcacgacaagacaatgaaaatagagcaaataatggattaataaaggctatatttctaatgacacttgtcgtatctagggcatctccggcaaaaccataactgagtaaagagtaaactggaaaaagtagatataaagaaaaaatagtccattcatttcttgattttattcttttttgcaagaaaataactaaaatatttaaaacaatcaataacaaaaaaacagtttgtttaatgtttggttgttgcaatgatttaaaaaaatatgaaagtggcaaataggaaataaaaaatacacagataattgaaagtattgaagttatttgtttttgtaaagtaagcatttctaaaatgattttcaaatttccaataaattttgagataaattacagcagattgtatatcatttacctagaggtgctaaaaaattcgagccagaagcaatataaaaagaagcaaataggtaaatgacgtagtaaaaactaccgaaaacagtataaaaaaagattgcattttccatagaaggagaataggtgaaaacgagataagagatgataatccctacaacttgaaaggtcaaatcaatgaactgaccttttttggagaagaataaaacataactcaagggagaagatataaaaacaaaaaagtatagaattgacaaagtttcggcatactgtcctgcaataatccaatcgtgaccgaatacaagctcaaatatattgcttccgaagaaatgcaacaataaaaatggaaaaaacgaaatgactattagtgactttagtgttcttaggtaaacgtatttacattcacccttttctcgaaaatctttccccgcattatctttaaagacagttaataccgaattgcctagtaaaccaattggaacagcaagcgaacgaagagtgagagaatacactgctacgcttaatgaaccaaatcttgttgcagtaataataactgggaattggctactaagagaactaattaattcagaaggaaaagaaaaagttatgaagtgataattttctacgaatgtttttttaaaagaggatatagatatgttagcgaggtcaccaattgaaatactaagtagttttgctgtaaataggactgacactatagaccataaaactgcagaataaaccaatccattaattttccatccaagtaatgtagctaatatctgcgatagtgatatagacacagcaaagaaaatttttgacttattcaaaaggtcgaattttgatctgtaaatagagacagcctgtaaggtacgattaaaagccattgcgagcgagtaaataacaacacttgcaacaaaaccaaaaattaagttatctgcattagcaggggcaaaaaaattaaacaaagaagctactgtaaagacggtaaaacatacaactagtccaattacaaaagcaaactgcaacaattcattgacatatctatcttcatgagcaacaaaaatagatttatccagtccagcattgattgttaccatcacaatactggagattgccatccatgtaaaatacgaacccaaagcatctttactaagtattcgcgcaagtaaaactactgccaacattggaattacctgtgataaggacgtcccaaacataaccgtgaaaacattacgccaaaaaggagtaatttttatatgtttcatatagagaaaagtctagttgttattaaagcttttgtgattctcttattgagcaatgctggatttaatattataattcattccgtaaacagggagatacagtagattcgaggtttatgaggtacagtagccgattgaacttcaagttttaaaaccaactattaagattggtgtacctcatttactccaaaagtgctgtatgtatacttaactttttctaaattaagactttcttgtgtaatctattacgaaactcgttactgctacaacagtttcatttttcatttctggccaaatgggcaaactcaaaacttctgtagctaacaaatcactaaccgggttaacaggatactccccttgataaacaggtaacttgtcctggggaatgggataataaatcatggagccgatgccctcaccggccaagtactgctgtacaccgtcccgattacccccagttatcctaatggtatactggtgaaacacatgaccatctgtaattactggagtaatcacacccgaaacatcagccaacaaatcattgtaaactttagccgcccgtcgccgtccctgattccactggtcaatatactgtaacttcacccgtaaaatcgccgcttgcagggtatctaaccgggaattgtaacctaatatctcattgtgatatttcttttttgccccatgtactcgcaacatccgggctaattctgctacttggtcatcatttgtgactaccatacccccatccccataacagcccaaattcttagaagggaaaaaggaataagcacctacatcaccaatagttccggtaaacttaccttgaatagcatccctagtactttcttgacaatcctcctcacacccaggacaggcaccataatacctggctccaaaggactgagcgcaatcttcaatcacctttaacccatactcctgggcaatatccataatttgccccatagcggcgggattaccatagagatgcacaggcataatcgccttggtcttagatgtaatatgtttcctgatagcttctgggtcaatgttaaaactccgggtttcaatatcagcaaagattggctttgcacccacgttactgatagattcagccgtagcaaaaaaagaaaagggtgtagtaattacctcatcccccgccccaatacccagggcgcgtaaaccaatcaccaaggcatctgtgccggagttaacagcaattgtatgttttacccctaaatactctgccacctcctgctcaaacagcttgacatcaggacccataataaattgaccagattccaagactcgattcatcgctgcttgcacttggtctttaatttgctcgtattgaggtttgaggtcaagaacaggaattttcatggtttggtaaatggtttggtaaataaattagtaaataaaattgttgaatgggatattagaacgggactgggcaattaattcgccgacaacttgatgacctgatttgccgataattgctgatacttgacctctgtagaatctacagcatagccatctgcatcaaactccaatacatcaccataggcgctcatccaaccgatgattctggctggaactccagctaccatagcataagcaggaacatcttttgtcaccactgcacccgcagccacgaaagcacactcatggagagtgacaccacaaacaatagtcgcattagccccaatactcgcaccccgtttcactaaagtttggcgataatcattgctggtattgcgaggatattcacaacgcggcgttttaatattagtgaataccatactcggtccgcagaatacataatcttctaaaatcaccccttcatatagggagacattattttgaattttgcagttgttgcccaccaccacattattagcaaccagcacattttgtcctaaattgcaattcttaccgattttcgccttgccaaatacatggcaaaagtgccagattttcgtaccttcaccaatttgggcaccttcatctacataagcggattcatgggcaaaataattaaccacgtaatatctcctgagctttttctaaaatttccactaccgctactccattccatccatcagaaaggggctttttacgggtttgcaaacagtctaaaaaatgttcacattcgattttcaaaggctctgaatttgccacatccacaacttgactgccctgatcacggttattaagttggtcatctacacccttgtgatatatagtcaccttttgagcaacttcatcataaacgagcatttcttgttccgtaattactgttgtgctgcgtagtaactcaggccaataccaagaagaatggaggtgagcagtttgcccgctctcaaagacaatatcaacataaacattatcttcaattcccggttgtaacatagcctgaccgctggcttgcactctcgatagagtgggattacccaataaatccaggacaaccgatacatcatggggtgcaaaagaccaccaaacgttttcttccctacgtactttacccaacttggctctttgggtggcaacatgaagcactttcccgcctttcccttgggctaagtaattccgcatccaagtaatagcaggttgatagaggagtaaatgccccaccatgaggatacgcccctgttgatcagcatattcagccagggattttgcctcttgagtccttagagtcatgggcttttcgacaaacacatccttacctgcttttaaggctgtcatagccaactggtagtgggtgggggcgggagttgctaacaccactgccgaaacatcactttctaagactcctgcaaaatccgtataagttttgacttgtggatatttgctttcaacttgctggcgtaaatctgggttcatttccgccaccccagccaaagcacccaaattataaaagttgtgaatcagatttttaccccaattcccagcccccaccacaattacttgtttcatattacttgtctcataatagtatcaccttgtctttgtcacagtctaattttctggttactccccgggtatccaatacggcagaagcatgactaaccaagttatggtaatcaatatcactgtgatcagtggtaataattaccagctcgtaacttgccaaggtgtcattatttaatggtacagaattaaatttttgtccctgaatataaatttcgggaacaaaggagtcgtgataagcaatttctactccatcttctaacaattgagtcatcacatgaatagcaggagattctcgccagtcgcccaagtcttttttatacgccacaccaagaatcaataccttagccctgctaggcgctacccctaatttatttaacaccctacaggttttttctctgacaaactccggcattttgcggttgatttcccctgccaaagcaataaaatgggtatcaaagttaaattccttcgccttccattctaaatagtgcgggtcaatggggatacagtgtccacctacccctggaccaggataaaagggcataatcccaaagggtttagtattggcggcatctaatacttcccagacatctatacccatgcgatcgcacaataaagccagttcattcactaaggcaatattcacagcgcggaaagtattttcaaacactttgactaactctgctgctttagcactatttaccggcacaacatggtcaatggtttgctcataaaacaacttagcgactgtcagagaattagggtcagaagctccaacaactttattagtattcttggtggtatagcgtttattaccagggtctaccctttctggtgaatgggcgagaaagaagtctactccttgtctaagtcctgtctcctctaacaacgggcgcataatttcatcagttgttccgggataagtcgtagattctaaagtaactaattgccccggtctcaaccatttagcaatgcctttagtgacaccttccacatagcttaagtctggtgtgaggttttttgttaagggtgtgggaacacaaattactagtacatctatttctggtacaacaccaaatcctgtgactgctttgagtttcccatcactaactacttgtttgaggtcatcatctttgacatcactaatataattatcagcattatttactctttcggatctcacaggattttgctcaataccaatcacctgaaatcccacctttgctttttccactgcaaaaggtaagcctacataacccagtccaataacaccgataacggctttgcggttgattattttctctttcaattcgtgcaaaattgtcatgttaaatttttgtattagcaataatctggataaaaacggcatcagtacagcaggtcataaaatctgagttgaaaagacatctctacaaagattagtcgatcgcccataaacattttccatgtttcagaaagcggatgtaacttaacccttaagttctaacgctctgctgctattgataaattaaattgacaaatcacacaaaaatccttaaccctcttcctagtcggttaaaaaccgacttcagcttttagccagggaattcattccccggcttcctggtttttgtgtttagtggaggttaatttaacttcagtttgttgttctgatcctgaaattgtggttctcagtcccgtatgtttattctatgtaatctcagatttaaatcatacgtaatggcgatcgccctagcactgttgcactaagccgatcgccccttggtacagtcaaccgtcaaccgtcatcagtcaagaaaggctttccaaccaagtctgtaactgttccacatccctaaagtctaataattcttctgctaaactttccagttgctctactggtagcatctgaatttgctgtttgagtgtatcatccaaggttcctaagcgacgctgtaacagacgtataactaattgggtttccccttcaagtcgtccctgttgtaatccctgttgtaatccctgttttccccctgctgtaatccctctttcaatatttcctcataccagggtgattctcttaatactgtcatgtcccacctcatgatttgttgaactaagggaatatccaatacaaaactagcaaaaaatgataataacggttctaactcttgcagttgctcatcctgtcttaactctctcaccgcttggcgtaatttctcttccctatttccaccctgcaaaattggtacaaattctcaccaataaaccgcgatcgccactcactccggctaggggctgaattcatttggtaataatttaattacaaactctagcactgtcgcagccatctgcaaggcttcttcagcttcatacctttccggctcaattatgtcccctgggtagcgaaattcggtggcgtaaggtgttagagtgtccgccatatcttccaaatcctgaaaatgtggttcaaaaactgaacacatctctactaaaacacccagatcatgggttttcttaaatactaaatcttgatgtgtcaaataagcttttaatgctttctcggcactctgttgacaatgataaacaacagcatctaataatgatacttcattttcaatgagtatgcgggcaaccttaatatctcgctgacttttaattatccactgcctaacctcctcatcattaggactatccataaaggattttaccttgactgagtgcctgactaactaatgaacttgctacggtggactttctttctacttctgcacgggtcataaccagaatatcttttggtataccaatcccatggagggctttatatgcttgacgcgcccgacgatagcggggttcattggaatcggagataatcactaacaaatcaacatcactatcttccgtaggttcaccataagcataggaaccaaataaaattacctgttctggattcagggcagaaactagccgttgggtaatatcatccaataactcgcctgttattatttttgcaggtatattctctgtattcatacagtctctcatacaaaactagcaaaaaatgacaataacggttctaactcttgcagttgctcatcctgtcttaactctctcaccgcttggcgtaatttctcttccctatttccaccctgcaaaattggcacaaatggcaatagggttgatatcttatgctcaaataccagtgtaaaacgatcgctttagttataatacacatggttgagcgatcgcctgttaacattccttagcctagctctatctcgtgcgggttaatccctaaactccgtaggtgagccgccagacgttctgcccgttggcgttcctgttctgcccgttggcgttcttgtgctacttgttgctgggctaattctgcccgttggcgttcctgttctgcccgttggcgttcctgttctacttgttgctgggctaattctgcccgttggcgttcgttttctgcctgttggcgttcctgttctacttgttgctgggctaattctgcccgttggcgttcttgttctacaggtgtaggaatccaattcccctccccgtcataccaccgcaaccagcggcgatgtaccccttgataaatcccctcccatagtcctaaacctaactcggcttctttgagccatattcccaccccttgggggcttaactcttgatattcattcactactaacccaaaggcttgtaactcatctgtgtagcgattaaatactatgtaatagggaatccttaacatcctttcatacaccgtccacttattaggcggttggttcacttccctgaaactgcgccctaggtcttctttttctgtccctggtgagagtaattcgactaccacaaaggggtaaattccctcctgccatgttacataacttaaccttaaatcttggccatcatagagcctggatactcccaagacagcaaaccaatctggacgtttataccattgggggtgtcgggagtcataatataaatttaggtcactggctgtgaatacctgatcttctttataggtgggagggcgaaaggtcagccgcagtaactctggttgtagtaagtgaaattcgtccggcaaaccaggctcctctgggtcttcgctcggtaagtcatacatggtgggtagaacttcccggggtgataaaggcggtgaatattgatacatataagaaaattgtaatatcccagtttggataatgctcacgcatttttatggattcatagctctcttcaagctgtcctacttaagtgttttctccactgagaggataccgttatgtgggctttcttacttctcagacatcctctgagttattgattatcttgtaaccatttttctaaatctgacatatttgtaaaatctaataaagcttctcctaaagattctaattcaggaatagagagcgatcgcactttaaattctaaatcttctgatatgtttccacaacggcggtttaacaggcgaatagcgagattagcttctcatttttgtacaccacgtttctcgccacgtttctcgtggatttgcaaaacctcttgataaaaacgagttggagtcacatcagcttctctcagattaagcattttttgaatctcctctatggagaatttagtgttaggcaatgatcaatgatccatgtttttaatgggcaacgccacgtgaacatcggggacgacacgaatatcgggacgaccttcaactggataccacagcagatgtcctgccacaaaaatggtctcgtcattggcaaagagggactcgatattgtctttaatctaaaaccttgatgaaaccttcatcaaacctttactagctttaataatattggctctactagagtggttatggtaaaataatataaataaaccggatagcggacgataatgttatactaattaacagtctgaagtgattatcacaaaagagtcttggaattaattaagattaagaaagttcaaaaagattgaaataaaaattagtgatttaataaatatgccatctaatccatattacgaaagttattaatcttgaagatatcaaggttgttaattatgattttattactgatgatgaaatagttatagaaatcgaaaataagcaaaaagagggaaaatgtcctcactgtgaaaatacaaccgataaaattcatcaaaatgattggtatacagtcagagatatacccctgagtgattatcaagtattgttaaaagtaaatcgtcggcaattgagatgtacaaaatgtcagaaggtcttcagtgaggaactgtcttttataaaaactagaagaacctatacaaaaagactagcgatgaaagtaattaaggaagtattagagactaatgtagagagtgcagctagaagaaatagaatgacagcatccgaggtagaaacattattaagagaacaagaagttgatttactcaaagaaaaacccggctctcctagactagatatgaccatttaacacttaatacttggttaagttcattatgtatcaagagattcaataaaatcaaaatcaatttttattaaatctattgttttggattagtggaatccttgtatgataatagttttagccgttattttttattaaattaccataaccactctaggagagccaaaaacccaagcagttaaaaaagttaaaaaagttagggatagatgaaataacccaattaaaaggagggaaaaactatgcagcagtattagtggatctagaaacaagaaaacccataacgttgttagagaaaagaaataaggaggtaatagcggaatacttatccagtctgggttcagagatattaaaccaaatagaagaagtcagtatagatttatggataccctataaaagtgtcattcaagaaatgatgccaaatgctcaagtagtggcagatagatttcatgtgatgaaacaaatcaatgaagagttagatgaacagagaaagaaggaaaaaagagcggcaggaaaaatcaaaaacaagaaagaaagagaagaaaaattagcaggattgactcatagtaaataccctttattaaagaaaaaggagagtctaagtaccgaggaaaaagctaagataaaatcagtacaaaaagtcgcgcccttcttaggagatatgtataggataaaagaagaaattcgagatatatttgacagtcaaataaccagtgatgaagccttagataaatttctcgactggacaggaatagcttataaatatttccccaaaagttgtcgaacgataagtagatggatagatgagattcttgcctattttgataaccgaactactcaaggagttgtagaaggaattaatcagaacattaagctcattaaaagaagagcttatggcttaactaattttgataattttagaagaaggattttactaaattggtatttctcctactaatttatcatatttagtctggaagagccatatttatattaacctattaacagcaaaccctgattagttgttattaatccaaaaatctttgatgttgttaccaccgacaacacgagactgcttgaatgtgaactcactgacagaagggttacgatggggatcaattactcctgttgcctgttgccaaagttctgttggtgctaatgataaatgatatacagattcacgtttacggacgtgataccatttagtttcttggcaatcttcacaccaaaacgcctctaaccactcaccctctaaaggaactgcggttttggctgcgattaacatcagagcttcttttcgtctgatgcctctctcctgtagttgtccaggtctctcagcaaataaactgtatttctgactcatgctatccatgtagcagttatgtactggacaacatatagctctacgcttagaacgattccgatttcggtcacaccttctctgcacttcggcctcctcaattttgatcgaaaaagatcaccagaaggttgcggtggagggactgagatcaataagaccatcaaagccctgctcctcattgaaaatttcagttattaaattctaaaaactaagttttgtaatcctgtggaacattttatcacatttgtgctgattgaagcattttaggttatagacgacaaactaaaatgttgtagcacacaaaaatattggctggcaataattggctgcgtaaaatttgattgcaaatattttcgagatgctttgttcatcagttctgctaatttgcgatcgctattcagcaggcgaatagatttagtttgagtcatactataaccattttcaacactcaccccacatttaccatcgatcatcatttttcgcaaataagaatacttagaacaaatcacggttatcggtctgcccgctgctaaagctgggtgtagtttactaggtgcaaccaggctttccatccctgcttcaacactcaccaaagacagattgcaagctgtagataataaggtagcactttttttcttaataaaacagaaacagaaaatttagttagtcctaagtcatttacctcttccatgaaactttgtcgttttgctccaatactaatgcaaaccaactgaatcggttcgtctcgcaatagtttagcagtttccagaatggtgtccatatcgtgacaccgacccatattaccagaatagagaaccgtgaatttattcactaaattatgttctttcgcaaaccagttattttccttggcatatttaaaggctcttaggttattggcataggattttttcttacctgtcatataacttatcagcattgacctcttaacatccaatcaatttaaaattgttccggacaaaataactcagtgaaatcacttttgtcacccaagaatagattagcgagtatcttacatgatctgaaaccccatattaggattttccagggttgagttcagtaatctctgtattccttgtctgttccctgttaagagttccctgttccctctcccaaatataaaatttattttgcaagactacttatacaccataattttggttatagagatgagatatagtctagatgattaaggtttgctgaacaagtcttatggtagagacaggcaagaggcaagagtttggtctatttgttatccccaaattttctgatttattgtccctcactgaccactgccaacttccgacttcagaattcggattcttcaatttcttcttatactgatgtactccctataactgaacgacgcaaattgtctaatgctgtgcaagcactaaggaggcgaataaaagagcgatttttcatagttccaaatttacactcataacttgtcacctcatttccaggaccagccataccaatatagactaaacccacaggttttgtagcagttcctccactaggtccagcaattccagtaatacttaatccccaagtagtttggagaagatttttcacacctgtagccatttgttcagctactgtagcactcacagccccaaactgatctaaatcgtcagggttaacccccaataatctaactttcacggtgttgtcataggaaattaccccaccccaaaagtaatcagaactgccaggaatttctgtcagtatttgtcccaatcccccaccggtacaagattctgccactgataaagtttcccctgaagatcgcaacaactcaccaacaacagaagctaaggtatcatcatcagcaccgtaataatctaagcccgcaatttccttaagttgcttttccacaggtgcaattaattcctctgctgccttttcatcaggcgctttggcagaaattcgcagcctcacttctcccttgccagcgtaaggtgcgactgttgggttaggtaaattcaaataagcagatactttttctgctaaggctgattcaccaatcccccaaaattttaaactgcgactgtaaataatttcctgaccccaaccttgacttttgagaaaaggtactgctgtatctgtccacattcggtgcatttcactaggaacaccagggaaagtcaaaatagttaatcctggacgaggttgccaaataatacccggtgctgttcctgtgggatttggtaaaattttcgctccttggggaattaaagcttgtttgcggttgctaggagacattacccgtcccctttgggcaaatttctgagttatatcttctaggatttcggcactttctaccaagggaacaccgaaaaagtccgcaatggtttcaccggtgagatcatctggtgtgggtcctaaaccaccggtgaaaatcagaatttgcactctggaagctgcaatttcaatcacttgtttgagtctttggggattatccccgactacagtttgatagtagtgaggaatgcctaactgtgctaactgctgggcgataaattgagcgttgctgttgagaatatctcctagcagtaattcagtaccaacacaaataatttctgcactcatgggactggtgattggtgattggtgattgggaaaaatctgctatataaaacctagacaaaactagactttactttctacttcaacgggagcatggcagcggttatccctcagtagactttcacgccttagccagacgcgataaattaattgcagcgtttagatccctatctatttcaaaaccgcagt

SEQ ID NO: 58 - DNA, 34601 bp, Sphaerospermopsis sp. LEGE 00249
  LEGE00249_73
tgtctttgacaatcttgggaaatgaatttataatcatgatcaaatcaatattttgatatagcttgctcaaattttaatatattttgggctatttttatcacagatttcttaacattcaacacttctgagcttacagctattttcaggtaaataaaccacattttgatttaggtttcccgtcaacaatgtaggggcgttcgcgaagcgtgctggaagcatcagcattcggacaattaattatcggtttttacctaagactatcatccgaatgcttcgcccttactagttttgagcttacagctattttcaggtaaataaaccacattttgatttaggtttcccgtcaacaatgtaggggcgttcgcgaagcgtgctggaagcatcagcattcggacaattaattatcggtttttacctaagactatcatccgaatgcttcgcccttactagttttgagcttacagctattttcaggtaaataaaccacattttgatttaggtttcccgtcaacaatgtaggggcgttcgcgaagcgtgctggaagcatcagcattcggacaattaattatcggtttttacctaagactatcatccgaatgcttcgcccttactagttttgagcttacagctattttcaggtaaataaaccacattttgatttaggtttcccgtcaacaatgtaggggcgttcgcgaagcgtgctggaagcatcagcattcggacaattaattatcggtttttacctaagactatcatccgaatgcttcgccctgactgtggtctaaagacatgaaaatcgctgtaaccgaaaagtattgtatcccgactgggaatgatagcgaagcgtggcgttaacctactcagactctacaaactctggcagatcattaggtgcgccacaagcagaaatattactggaaaatttcacatctgactctacaaattctggcagatcattaggtgcgccacaagcggaaatattacctgtaaaattcacatccgccattaattctggatgttcttgtttacgttgtgcaatttcttcacgggtgagaatcttcgactcgtcaaaacctaactcaatttctgtgtttaaccccttatacttcacccgttttaaattgtaaaatctcttgttgagggtggttgtcacaaaagctttcaaacaacctaaaagatacttacgtttaaaagcatccttctcaaaccaatactcaaaacttttgcggaggtaaaaccgggcataatttcgcagcactccttttaatacatcttccctttccattgcgtcgggtttcatgatcggagtaacaaaattatattgagaataatctctcacttcaacgcgatcgcccaagtcttgaaataactcagaaaatggccaaggagtaaacatattccagtttaccatgtccgctttccaatccaaagccattttgtaagtttcctcaattgtttcaggggtttcattttccaaacccataataaattgagcttccgccagcataccattttgttttaacaattgaattgcccgtttattttgttcaattgtggtttctttacggaacaaattcaattttaattgtgctgctgcttctgttcccaaggaaacatgaactaacccagctttgcggtacaatggtaaatcatgttcatcccgcaatatatccgtcactctggtatttattccccaatgtacacccaaatttctttctatcaactcgttacacaaagcgataaatttgggtttattaatagttggttcttcatctgctaaaatgaaaaatcccaccttatgttttttcaccaaaatttcgatttgatcaacaaattgtttcggactgctagaacgatatttgcgccaaaatgcccactgggaacaaaaccgacaagtgaaaggacaacctctagcatagttgggaacagctacccgcacatttagcggagtatagatatatttactccaatctaataaatcccaatctggggtgagagtatctaaatcagcaatcggcggatgggctggtgtagcgacaacttgcccattttctaagaaagcaatacctaagatattacgacgttctgcttcatcttttccgcgagcgatcgcactgattaaattaacagttatttcttccccttcaccccgaataatataatctacccaaggagcttcattgagaacttcactgtacatataggtaggatgaatcccacccataatagtcttagcttcagggcaaacttgtttaacaatttctagggttttttgcgattgataaatcatcggtgtaattgctgtagccaaaacaatatctggctgatgcttttggataatttctgccaaagcatcatcagcaatataatcagtcatggcatcaacaaaacgaatgtcggtaaagccagcagttttcaacgccccacccacatagggaacccaactaggtggccaatttcccgcaatttccgcaccaccagaatgataattgggttgaatcatcagaatccgcataatctaactcctaactcttaccagaaaagtcaacgatggaaaatatcccacttttaactatgttgcttcttctagaaaatttaaaagggagaaaaatttctggataaattattactaattgatgtaaattacataagcaaaaaaaattaccagttaaattactggacaaaagttgtaattgctcgatttttatcttgtaaattactggttaaattaatttacttctattactttatagctatgcagccttaaatttaaaaaagttctgaaaaacttaatctttgggctttaattatctttgcaatatctgtttcaatacttgttggttaagcacaaaaaaataaaatcccgtaggttgggttgaacagagtgaaacccaacaaaccctgatgggaagaatttggcagtctttacaagtctggtgtttcagtccccttgcggggattaggtaattagaaaccatgattgggatttgtaggatcaaagtcctcctgtttgtttcagtccccttgcggggattaggtaattagaaacaatcaattttcagagcagcgatcgccctttggttttcgtttcagtccccttgcggggattaggtaattagaaacgtcgcgctaaagctagtaaggaattaaacgatgtttcagtccccttgcggggattaggtaattagaaactgttgacgggcgatcgcaatatcgtggcacgggtaagtttcagtccccttgcggggattaggtaattagaaactttgttctggggataaaatgctttcggcaatatcacgtttcagtccccttgcggggattaggtaattagaaactgggagaaacagtaattctcaagaatatcataggggcagtttcagtccccttgcggggattaggtaattagaaaccaaacgcccaattccttgccatgaaactctgcaagtttcagtccccttgcggggattaggtaattagaaaccatcaagggtagaaactgaaatcaaaagcaaaggtttgtttcagtccccttgcggggattaggtaattagaaactctgattttattcaattaggcattggtgaagatggcggtttcagtccccttgcggggattaggtaattagaaacttaccaggaggggggtcagtggtacgctcggttaatgtttcagtccccttgcggggattaggtaattagaaacttgttattagtttgattaaacccccaaaggaagattagtttcagtccccttgcggggattaggtaattagaaacaatcggttgcgatcgcattaattactttattcactgacgtttcagtccccttgcggggattaggtaattagaaacgtaccaagactagataaagtagcctcaatagtagtgtttcagtccccttgcggggattaggtaattagaaacttatctaaggagaatttgagaatctctacatcctgtttcagtccccttgcggggattaggtaattagaaacgatgagagaatgatctttccaatccatctgtttaagtttcagtccccttgcggggattaggtaattagaaacatctcttaatttacaaatcatcctcatatctctttagtttcagtccccttgcggggattaggtaattagaaacacataccccagtaagtgcatacataccccattagggtttcagtccccttgcggggattaggtaattagaaacattgacgattttcagcagctaatcgtcgcgattcgttgatccgtttcagtccccttgcggggattaggtaattagaaacagctaaagcttcaggtactcgtattgtcttagtttgtttcagtccccttgcggggattaggtaattagaaaccgaaagatttttatataaatacccatcaaaaaatagtttcagtccccttgcggggattaggtaattagaaaccatggctatggctgtcacagagaaatttgggcgttatgcgtttcagtccccttgcggggattaggtaattagaaacaacatagatggacaatggtgctggagaactgccagattgtttcagtccccttgcggggattaggtaattagaaacacaacttcaaacacgaaccctgttgatggttcgtaaagtttttgtttcagtccccttgcggggattaggtaattagaaacactgactttgggatgctgacaacatcccctacagcagtttcagtccccttgcggggattaggtaattagaaacatcttcagcatatctttcagttttcgttaattccttaaaatgtttcagtccccttgcggggattaggtaattagaaacctaacccaagcgggtaaaggaacaggaggcaagggtttcagtccccttgcggggattaggtaattagaaactctgacctaatctagtgcctacatcttttaagcgtttcagtccccttgcggggattaggtaattagaaacctgtagaggaaactttagaagtatatactggttacggtttcagtccccttgcggggattaggtaattagaaactccgaatcccctatgaaggggagcgttttattggtgtggtttcagtccccttgcggggattaggtaattagaaacattgaagacttggactgagtttctagccgttgatcaaacgtttcagtccccttgcggggattaggtaattagaaacttaggattttaaagtcaaaaaaaactcatctaatgtttcagtccccttgcggggattaggtaattagaaaccaaatgctaaagtgtatttcccttctaatatttgatgtttcagtccccttgcggggattaggtaattagaaacgtgagtgtgaagacgttggtagtagtgtagtaagttgtttcagtccccttgcggggattaggtaattagaaactatttccacagtcaacatagttagcgataacgagtttcagtccccttgcggggattaggtaattagaaacctatttcagttaaggctaataataatagtttctctaactagtttcagtccccttgcggggattaggtaattagaaacccaaagtagcctctaataaccatttacaatattcaggtttcagtccccttgcggggattaggtaattagaaacttacgttttatttcgcgaagttacgtttgttgtaacaaaagtttcagtccccttgcggggattaggtaattagaaacgactcaaatcattaaaaagtacagaagtctgcatttgtttcagtccccttgcggggattaggtaattagaaacttcagaataagtaaacaaaaaggtggacgcaatggaagtttcagtccccttgcggggattaggtaattagaaactggtaaatgcacatcccgttttagtaacggaagagtgtgtttcagtccccttgcggggattaggtaattagaaacccattcttccaggcataggcgaaatattttagtgttttgtttcagtccccttgcggggattaggtaattagaaacgtactataattacaaatataagcgccttagttcaagtttcagtccccttgcggggattaggtaattagaaacccatcctttatctgtgcagctaatggataaaaggtttcagtccccttgcggggattaggtaattagaaacagtggtagaaatttacagttcagagcaaacctatgggtttcagtccccttgcggggattaggtaattagaaactctatcttgtaggttatgtaagcgtctgctagtcgtttcagtccccttgcggggattaggtaattagaaacttttcagtgccaacaaaagctcctactagaacaatgtattgtttcagtccccttgcggggattaggtaattagaaaccttccaacctaaagagtttgcctgttgttttagagggtttcagtccccttgcggggattaggtaattagaaacaaaaacgacctctttattcttacccttcattacttttgtttcagtccccttgcggggattaggtaattagaaacaaagctgctatattttcatctgtgagggtgtcagggatgtgtttcagtccccttgcggggattaggtaattagaaacgaataatggtcgccttttacgctctttagatgtcaagtttcagtccccttgcggggattaggtaattagaaaccataagttatagtaatatcggcttgtgttcccgttggtttcagtccccttgcggggattaggtaattagaaaccaggctaaaatcagggatatccctgattggataaagtttcagtccccttgcggggattaggtaattagaaactattccccttgggcgggaatatcccagatgttgcttgtttcagtccccttgcggggattaggtaattagaaacccctattcataggcaaacccggacaccctagtatttgtttcagtccccttgcggggattaggtaattagaaaccagataatttatcaattttacgctgtgtttctaggtttcagtccccttgcggggattaggtaattagaaactatatttttacatcacgtaaatttaacggttgtcttgtttcagtccccttgcggggattaggtaattagaaactcatctggttttgagtgcaaataacgtgatgttgtagcaagtttcagtccccttgcggggattaggtaattagaaacctacagcgtcgctaacctagctgaaagagatgccagtttcagtccccttgcggggattaggtaattagaaacgggggagagagggacaagtcctaaaccgctcccactgggaggtttcagtccccttgcggggattaggtaattagaaaccctgcatggcagaaaaggtcaaaaacacgacaatggtttcagtccccttgcggggattaggtaattagaaaccccgccatctgaaacatagtctgagagcagactgtaggggggaatttggcggacctctgaaaaaacctcatttcaggcttcgggtcaactgccaactgaaactgatgaaacgctagaactattcaattatcaaggttctggcgatttggcggaccccccagggtttttgaccccgctctaggtttgccaaatttatcctgatctaagagtaaaatttagcaacctacttgtcaagagtttttttattacaaataattacgcactgctatataaaacctagacaaaactagactttactttctacttcaacgggagcatgggagcagttatccctcagtagactttcacgccttagccagacgcgattgtgttccaattaagtttctgaaaaagactaccaccatcattgcttggttttcgcgtcggcaatagtctcaattcaatacttgatatcaccgtattatatatcaagtagttgattttttcctaaaaatatattgatttttgtcaatataagtatagttttgtctatgaaattgtcaacttaggacttgctcctgactccccactcctcaccccatccccaccaggggaccaaaacatagtataatacagaaaatcacattatgtagcctcaaaatgatgcccagaacagctacatccagtaaacgcaaaaccccatctaaaaatactcctctagtatgggcagataacagcgaattagtcggcctagtctttgacctagaagcaaccaattctacatacctatactcacaatacaccatcggacttcatgcctggtttctcgatcaagtcagacaaattaaccctaccctgtccgcatatcttcatgatggagagtcagaaaaacccttcaacatctcagctttagaaggccaactacttcccgcaggtaaacaactacaactgcaagcaaaccaaacctatcgctggcatcttcacacattttcccaaccagtagtagagtttttaagtcagtggttaacccaacttccaccaaccctaaatttaagagatgcttccctacaaataaaaaaagttagtattctccatccaccaactacatatcaccaaatcctacaatcatccctcggcaaacacacaaacattaatctgagctttatttcccctaccagttttcgccgcaaaggacatcatttccctcttcccgttcctgttaatctttttcatagttacctgagacgctggaacgacttttcaggaatgtccatagaacaagatccctttctagaatggatagatgaaaacgtcatcattcacaaacaccgcttagaaacagtaaaagttgccgcaggtaaaagaggttcagtcacaggttttacaggagcgatatctctggggttgagtaaaacagcattaaccaacagagaatttacccaattattttatgccttaattcaacttgctccctactgtggtacaggacataaaaccacctttggactcggacaaaccctgttagaatgggtagaaccagaaaccaatacatcagcagaaattatcaacaacctgctaccagaacgcatagaagaactaacagcaatattcaccgcaacacgcaaacgcacaggaggcgatcgcaccgaaaaaatagccacaacttgggcgacaatattagcaagacgagaaatgggcgaatcattaaaaatcatatcccaagatttagaaatcccctactccaccgtcaaaacctacgttaaattagcccgtaaagaactaaaacaattgacaattgataattgataattgacaacttttgcattcaaacttgacagcagttttcatgtatttttgccacacccttcttattctcttactttcttcctttgcgcctttgcgcctttgcgtgagatttaaaaatgtgatttaattatccattatccggtaaatttcttggtggtatcaaccgcccctgataaaaccgtttttccaacctacccaaaccaaaccaaattcctgcaccaccaaccacaaccaaagacagaaaaccaacagtaaaaatattctgctgatcatcaacaaacatcagcaaaggaagcaacccccaaaccaaaactgttaaccctgcaacccccatccgcaacttttgtaaattagccaaagcaccccgacaactagcacatttttttgtatgagagtggtatctatctaacaactcttcctttggtaatggtggtgagaaactttttccaggaaacggatcaatactatattgatttacccaagaacgcaattgaaaaacaaataaatctgccttagttggcaaataaaacgccttagtaaaattctcacttccaccccgtgcggctaaatatctttcttgatgatgtaagaaaatttgatcatcttctaaaactctattttgtccaatatgtgaataccaacggggagttaattttaaaaatattcctggtaatttagcagcaaacttaaaaggaaaaatcgcaaataaccgacattcacctttacgaattggagtagcataaacaacagttaaagttctgccaaactgtttagatgtcaagtcatgccacattaaaccaggagcaataaaagtagtatattgttttcctaaagtaccttttctcggtccttcttcccaaattcctttaaatccccattttcctgattctactacttctaattccacaggagcaacattagcgcggttgccgacggtacggtgatgggtgtaaggtatatgactggaatctaagacattttccattaacgtcaaagcatcatagggaatatctctaaaagtattgagacaaacccaacctgctgattcttcttctaaaatatcaacaatgggaacttgagttttagaggcattttccgcagttcccggataaacaaataacattccttgtttaacggtggttgggaatgaagttacacaagcacgttgagaaatttctgcttttccacctgcgacttgttggggaatgcgatcgcattttcccgttcctgaaaaagtccaaccatgataaggacattctaacaatccatcttcattaattctaccttctgacagaggcgctaaacgatggggacattgatctaaaaatgctcgccatatatgcgcgttattatcccaccataaaaccagatccttctctagcaaagtgaagcgagtaggctgggttttgtctaaatcttccacataatgaacaggataccatacctcttgccaatcaaagcgatctggatcgagtccaccagcgggaagtaattctgtggttatggttggagatgcgtttgactggataatgctgttggacatgatagaattaacaatgattgtaaataatgtttattaccccaaaactaagataacaattttttaataattttggcagatagatttcaaaaatcagcttatgattgaaccgcaaagtacgcaaagtacgcaaaggtaagagagtttcagagagtttttggtgttgctgcggttattttggcaaaattgggatgttccgcagaaatcagccaattgtctaaaattgtattactcaagtattttaacaaaaaaagtaagactatgatagtagtagacacagaaaaatgtacagcagcgaaaacagagttacgtcaaatattagctgcttgtggtggtaatactaaagataaaaatgtcattgctgcaattgaaaatctccaatctttcaacccgacaacagcaccagcccaaagtggtagtttaatggatagtgaatggttgttgatcagtgcgccaaattttccccaaggtgaactactagcaaatggcaaatatgcttatactttggggcgtttggcttttaatatgtttcaaccaacaaaattaaaattagtaattgatcgcgttttacaacctgtgtttccagtaggaaatggagagcaaagaactcatgatattgtggtggaatttacaactattgatgaatctgttccccaactttcgggaattgtaatcaaccaaggaatttgtcaatctgtcagtgatacattgctgcaagttcagtttacaggaggaattttaaaaccgcaatctacaactaacttagaagattggaaagcggtttttagtgaacaaggtaaaccagaaaaaagaagttggcaagatattttgatgtctggttttttaaagttgatgtttggtttagttcctccacaaactatgaatcctgaaactggagaagtttcatttatgatgaatcgttctcctaaaggacgtttagaaattctttatttagatgaagaattaagaattactcgtggagaaaaaggaactgttttagtttgtgaaagactgggttcaaacaattgacaattgacaattgataattgacaattaattgaaaatgtttgtttttaccttgtaggggcgttcgcgaagcgtgctggaagcatcagcattcgggtgataacctaagctgttgtgcatttaatttgtataagtggaacaggcatcttgcctgttccacaagagttcagaatattaggattatacaatttagctgtgtaacagcttaaaacaattgataattgacaattgataattgacaattaattgaaaatgtttgtttttaccttgtaggggcgttcgcgaagcgtgctggaagcatcagcattcgggtgataacctatcactgaaaccagttcatattctgtccgaatgctatacgccctgacgattaatgaatcggtgttctaggtactaaagaagcaacaattatcaattatcaattatcaattatcaattattaattcttcctttaaacgatacaaaattgtatttttatcaacttgggtcaaaatctcttgaatgacggtattagcgcccaattgtccccacgtacagcctttttctaaatagacctgtgcagctttacccacagcataagcaccataaccagcaataccgccttgagcgatcgcactaccagcaaatgtagtaatattcagaggattatcaccactagcaataacagcagaacttttacctaaacctaatacaaaactactgcctatttctcctaataataaaccaccggaactcaataaaatggtttttaataaatttgttgcttcatagctagtcatgggtaaagaatataatctagctaaggaacgaattaaagctaaatctgtaattacaccaccaataatatctaaaaaagcaatcggatttaaaccaatagctaaagctttatatgttgcgaacttccaaataatatcttccgcttcttgttgccgaaaatcaacagttttttgggcaataatttcttcagcttcccgcgcttgaatgagtgcatttaaagctaagagcgatcgcccttctctatttaatatatgcaaaattgtttgtttcagttcatctacctgggggggtggtgtttcccattcataactcacacttccatcaggatattctactctgacttccatcggtgcaggttctgctgcaaccatgacaatttcatcaggtaataatggtgtcgcttggggatctccagcacctaaaacttgtaaattctgataaatgctttttctatctgtatcaggatacaaatcaattttattaaatactaaaatcagcggtttttgtgcttgacgtaattgcagcaatgcttgatactcagttctagtaatatctcccgacaccacaaacaaaatcaaatcagcttgctgtgccacatctcgcgccatttgcgccctggtttctccctcaatctcatctaaaccaggtgtatcaattaattcgacaattaccttaccacctggtttccaacgtagcgatcgcggccattgagtcacaccattcagcggtccagtttgcagaattttttcccccagcaaagaatttaacaccgcagacttaccacgactcaccaaaccaaaggccgctattctcaccacattagagtctagtttgctaagtgtggtggttaaaacctctatttctggttttaccaaacctgctaattctactttagatgatagctggcctgacttgcggagatatccataccaagatatcgcttgtctaagactagcacgggcgcggtttaaatgagtttcttgcagttgagacaaggtgacagcaaaaaaatagattacatatctatttatatcgaaaatttgagccttgtgactgctgccttaacaattgataattgacaattgacaattgacagtggtagcatcccaattttgacaacataaacgcagcaatactaaaaactctcttaaaccctcttaactttgtgtcctttgcgttctttgcggttcaatcagatcaagcctgggagaaaatgtaagattgcaaaaaaataaacttacacattagacatctccgaaaattcaatagacttctccagaaaagaaattatggaacctatttatgggggcaggtcgaagcatttgggatatctagatgtctgatttttccgtcaaattatcgcccaaatgcttcgcccctacaatatatatcaactatcaactatcaactatcaattatcaactatcaactgtcacccaaagcttcaacaatagtgcgggtattggcttccatcattttgatgtaagtatctgcctcgcttcctttttcaccaatagaatcagagtaaagttcattgggtgcaagtttaacacctgcttcttgggccacagttttaattaaagtgggattaattgtagtttccgcaaaaattgccggcacacctatttttttaatttcatcaactaattgtttcacagtttgggcgcttggttgttcttcagtgctaatccctattaaagttccggcaatttccaaaccataagcattagcataatattgaaaagcgtcgtgggtagtaatcaatttgcgtttttctgggggaatagtttgaatttgttgtttaatccaattatttaattgttgtaattcatttgtcaatttttttgcattttcagtaaatttttctttgtcctctggtgataactcaatcaatgaatctctaatagcattcaccatagaaatagcattttctgcactgccccaaacgtgaggatcgggaacagtttgcccttgactttcttctagttttaaaggttcaacaacttctcccaccgctaactttttcgcttttcctccagcagcattcattaacttaataattcccggttctaagttgtaaccgttatataaaattaaatccgctgttgccaaaactcgactatctgcgggtacgggttcataaacgtggggatctgcacctggttggagaataccagttaaatttatttcctctcctccaacctcctccgccaaatcagcaatgatagtgctagttgctacaacttgcggcttaccatcccccggtggttgcgactcagaaggagtacaaccaaataaaaccaaaggtagaaatattcccaaacaaaacggggaaatatgcaaagcaatctttgtcttcttaaacacagtgcggcagtctatccctgacattagtttcatttatctaattgattaattcaaattattggttttttcatttttttctcatttttatagtaagctcaaagaatagatattttaaacacgggtatgcaaaatatttctttttaccaaacattcaatttattacggagacagtcacaggaaatacctgtacaaacgagaaaatctattgatatgagttctcaagcaaccattaacatatcccatttaggagtatattaccgcacacaagaagctttacgggatgtgaactgcatcatcaaaccaggaaaattaacaggaatttttggacctaatggtgctggtaaaagcacactaatgaaagcaattttgggattagttcccaagagtagcggtaacgtcttgtatgaaaataaacctttaaagcagcaactagaaaaagttgcctacgtaccacaaagaagccaaatagactggaattatcctgctacagtgtgggatgtagtgatgatggggcgtgtaaaaaaaacaggttggttgcgtagtttctcggctgttagtcgccaagtagcaaaagcagccttagaacgggtaggaatgaaagaatacagcgatcgccctattggagaactatcaggaggacaacaacagagagtatttttagcccgtgcattaacccaacaagcagaaattttttgttttgacgaaccctttgtaggaatagatcaaaaaacccaagccataatttttcaagtttttcacgaactaacagcagccaataaaattgtattagtagtaaaccacgacttaggcgaatcaatcacccattttgatgatttaattttactcaattgtgaactaatcgccacaggttcacgccaacaagttctcacagaagaaaacctacatcgtgcttatggcggaaaagtcatctacttcagtgatgcagcataataaattataattcaggagtcaggagtcaggagtcaggagtcaggagtcaggagtaaaacctgcttgatagttgatttttggattaaattttgtacttcatttacctgcaagatactgtaattattttatctatctcttcctcttccttctcttccttctcttccttctcttccttctcttccttctcttcttccttcgtgtacttcgtgccttcgtggttcattctcatttatgttaaacacactaattgaaccattacaatatagcttcatgcaacgttcattaatcatcgccatattagtaggctcattatgtgcgatagttggtagttacttaatggtacaaagactagcattactaggtgatgcgatcagccattccgtactaccaggactggcgatcgccttcatgataggtgctaatatttttattggggcgtttattgctgggatattaagtaccatagccatagcatttattaaaacccgttcccccatcaaagaagatgcagcaatggggatagtattttcagctttttttgcccttggtattaccctaattacaatcattcaaaaaagcaataaaatcgaccttaatcattttttatttggtaacattctcggcgtaacagttgacgaagtgcgagacacagctatcattgctgctatcgttttaatcatcgtttttttactatacaaagaactgttattttacacctttgatccattaggcgcacaagccgcaggtttaccagttaatcgtttaaactttggtttaatgttgttaatttctttaacaattgtcgccagcatgaaagctgtaggcgtgattttagtattatcactattaattaccccaggggcaactgcatatttattagtaaaacgattacatgaagtaatgattttaggggcggtaattggtgtaatttctagtattagcggaatgtatctgagctatttttataatttaccttctggacctgcgattgtgttggttgtttcgggtttatttatcttagcttttttgtttagtcctagacatggaatttttcagcacgctggaggcaaacagcagaaaacaggaagttagggaatatcaccttttacccatcttcacagaaaatgggcaaaaaagcgatcgctcttgttaaattcttcctgatttggcagacaccccggcggaaacatataaaccttaattgatcaattaccctcaggtggaactgggggtttcactaaaacatttttcgattatatacaaaaaaaatatttgcataaccgaaagtttccggatctagtcaaaatccctacggataagaaaaacagtagatgcaccttaatttagatcattaccctcagccattagctgggggttttatttgagcaattttgaattgctttgaattgcttagttttgtatttttgtgagtaaaaaagttctttgaccaatagaactttaattgagtgtgaatttctatgaatcactttttcctcagctttttaggctgggtattttattatagcgtattctctagagaaagggtagtttttgagaaaagttttttgacattcccagacaaccgcaattttaaagcaaaccaggagctaagcagactgcataaccaatcagtgcaaataacaacgtaatcaaagctgtcatcacataacaaatacatattagcaagccatccgattcaatactggcaacagcaaaaagtaaaataccgatggtagggataggattggtaaagggaacaggtgacattaatagaacagtcaaccaggaaatacacaagccattaaatcgccaaaccaaatcatgagaagcaatttttgtcaagcgaggacgagtaattttttctaataatgaagtgactcgacataagttttgcaggataacttgagcaaaggggcgaggaaattgataagtagcgatttttctaggtagccaaggcgatcgcctaccaaatagcatctgcaaagacaaaagcaaacaagcagccccaaaaggaccagttaaccctggaggcatgggaaacaaaaacggtaaaactaataatgcaatcaccaagctaaaaccccgttctgaggtttctgtcagaacatcacctagagttagtgactggtctgataaacgttgcagtaaagactttatctcttgagaaaatcttagatgtattttcataggattttctagtaaataccacattcagaagactacacaggggtgaggggggatctaatcgagaaataaacctgaatatctgtaactagcaacttacgttaagtagtgatttcgccatcggtatttgttagtgttagttaagaaaacagtaactagtacagcaaagcgtaaataaaccaaccattctcaatgactaaaaagcttacgacctattatgtttgacttttgacttttgacttccgcgaagcggtactagctactaaccctggaaaatctttccacctactttcctgtttctcaacctcaaccctttgattgatcaatgttttgagtttattcagcaacccctattaattgatcatagcgtttgttgggtttcactgtgttcaacccaacctacaaaaattctgagtgacagttggggtgcggaatgtgggatctaaattgactaacgttttgagtaacgaccatcaaaaaaccggggtcatgccccggcttttaaagtctgcgtcgtttccgctcaacagccgtctggtccacagaaatgtcttccgtacagtacctctgcttcacagatatagataatgcccgcataatccatgaaaaatgtaattgcgaccttatctgctatattctccgccatctcccgtgtttcggtgagtacctcgaacttcacatttgaatcagtatcagcagtgttgggtttaccggtagagcgcacgttacgactacctttaccgccagtatccaccactgtgtaaccagtcgctccgcattcttcaatgatcttggcgacctttttgagcagcaccttttcggtgacgatgacgagcttgttggcacgcttggacatattgattacctccttacctacgtaacttgatattatatattcttgttatgcaaacccaatactgagttgcttagtctgctggttcaaggagcgccaacagaccacgacccctctgggattagccgccgatcgcctgggcaagcccgacaaagaagggtatacacaagccgattgcaactggtgtaccaatggctgtggatgcacctatataagcggagggattagccgacgggatacctgcccgcaaggtaggaggaccggagatatcggaactagaggaagcgataacagctagaactacaacaccacccatgctgaagttcatggtgtagtgagcaatcatacctaaaccgaaggcaattaacccatgtataaatggtgctatcacactatacacaacgtaccattgagctactttacgcagttcgccaacccttgaccaagcttccatacccataaccaacatcaagatcgagagcaaaccacgaaaggcgggatcgtagaagcttttgtaaacactttccggctgggtgaacagtcccagagctagacctaacaacatggcggataaagcaggaccacggagactttcctcaatgatcggccatatcttcactttattatcaccgggatctttctgctgactgagatactcctgtctggtagtgggataatcgcccgccgccacagcctgcttgctgaaagactcctgcatagcagattcgccggcttctttaagtttcctcttgttgaggtaaatattagctaccacaatggcagttacaagggcggggatatccataaagggatagagtgcgccagtccatgcttcaaagggaattttttgttcttccagtaccgtcagaccagcagccattgtagaaccactcactgctccaaacaaaccaccagtggcgatcgcgtcaacgactttgacctttggcagtttggctaaggtatagcgtgagatgaatacaatcgtaatccctgttactacagcaaagatcatgggtaacaccatctctgtcagattagaattacggatcgcaattccaccggtgagaccgattttggtcagcagcatgaagacgatgatcgtacaaattgcctctggaattaccaattcactaccaagagcagcaatgatcatccccccaatcaaaaaagccagtgttggagactgcaactgagcaataaagtccgtaataaataaggacacaaaatccacgagtacctccttctcctctaacgaagagcattgaatcaatgaactaaatgagatttaaagagctaaagaaagtaagaatgaggctcttcacccctacagcacaggtttttaccgcagactgaaattacaagcatttagccacaccaaaacaactattttcaactgccaaaaacttgatcgctaataatgcaactatgattatttggtaataacaacccttggtaacaattaaaaattttgtcacccagtttatgattagttgaaaatattaatgttggctaatttctgttgatgtaatttccagaagttaagctgtcaaaataaaaagtaaagagtgtttattaacagcctttccagttttatgttgcggtagaggatatactaatgttgatataaatatgtaatttcaacatttaagttttatgaaaatttggttgtcaaaatacatctgtcaatgctcctcaagtagtgcttaactgttttctaagtacaaaaaacagcaagtgtaaaatatcttgctgatttgtgattatgtttgacaatttacatgaattgtaaattaaggttctacttcaggagaaatcctagttaccttgaaacacaatcatgcagaactatctacccagtttggtttttgcagttgaaaccggggatcaactgtttgattacaaatagcatacagcctttaggtcaaaaaaaataacccaaagacatgaattataaaaaaaatattatatacctcatataagcagaagcttatatgaaagcccaaaattggctgtattagtcaatgtataagttttattctatgaaaaccattatttatttatgagggaacagggaatagggaataggtaaaaaaaggtttactgagaaaatatataggcgaaatttaattcgcctggtttagtattaacctacatcatcatgagcgaaacggttaaacaggaagtctaacgcatagttacggagttgataatacttgggatcttccataattagagcgcgatcgcgtggtctagcaaatggaatttccatcacttccccaattttggcatggggtccattggtcatcatcaccaacttatcagctaaaaacagcgcctcatcaatatcatgggtaatcatcaacacggtacaacggttttcattccaaatttttaacaactcctcctgtaactcttctttggtgatcgcatctaaagcgccaaaaggttcatctaaaattaatactttcggacgaatagctaaagcgcgagcaatagaaacacgctgtctcatccccccagacatttgcatgggtttcttctccatagcatcagacagaccaaccatagctaaatgttcccgaacaatagatcgtttttcggcttctggtttagtggggtaaacagcatttacagccaagtaaatattttcaaacgctgtccgccaaggtaaaagcgcatagttttggaatactaccatccgatctggacctggtttaacaattggttgtccttccaataacacccggccagtggtaggagtattaaaaccagacaccatatttaataaagtggacttaccacaaccagagtggccgatcacacaaataaactcaccttgatcaacttctaaattgactccatccagaactgtaaagggtccttttttcgtggggtaggttttggtgacatcttgaatttgtagaaatgcttgacggttgcgggttttagtagatgaattattaaaagtgagagtacggttttgcatagttttggtaatgggtaattggtaatgggtaatgggtaataatctcattcccagactctgtatgggaacgagaaaactattaccttctgctttttttaagccgttttaagctgctacctttctgggagtatcaagtaccacttccgccacagaaaaatcacgtttaatttctaaactactgagataagcaaaaggatcatcagcgttgaaaggtttaccatcaaataattgaataggttgacgggtgtaactgatatctaaacctaattccctcgctgctgtactaaacacacccacccgacaaactctttccacaatttctacccagttacgggggaaaggagtttcaccccatcttgctaactgtgtcataatccaagtttgctcagttctgctaggacgattaatggcagatgtaccataaaattgatgatgggcatattcccgcatgggatgatctaaatcgcaactattagcattgggatcttcaagttgaataaaatcaatgtcagtattcacatattcccgatttgctaagatggatctcacttcctgagcatttttaggatcagcacaatatttacaggcttctaacaatgctttggttaaggcaatatgagtattaggataagcactagcccagtcttctcgtacagctaaaactttaccaggatgtcctaaccaaacttccaaatctgtggcaattgtaaaacctgaaccttcaatggcggcgcgataattccaaggttctcctacacaataaccatcaatacttccacctttcaaatctaccaccatttgggcagggggaatatttttcatggcgacatcaatatcaggatcaattcctcctgctgctaaccaataacgcaaaagtaaattgtgcattgatgccggatgtacaacccccattctgtgcatttgatcgcgggttttcagcaggtattctttaaagtcagaaagactatgtacaccttgatcataaaactttttcgctagggtaatggcgttaccattgcgagtcatggttaaggatgtgacaactggtaatggttggtttttattacctcctaatgataaccatattggcattcctgatggcatttgggctgcatctaaatatccgccagaaataccatcaacaataccccgccagttactttctcttactagggaaacttcatctaaaccatgtttagtaaagaaatctttttctttagctactgctaggggagcgcaagctgtaatagggagaaaaccaatttctaaatttactttttctaaaccgtgacgagcaatggctggggtttttctggcacgtagttttttaatacgtttttgttggttgaggaagtaaatcatttcactacgcaaggtgtagtaactgggatgttctactacttccattcgtttcctgggtctgggaatatctacttctaaaatatcgccaatttttgattctggtccgttggttaacatgacaattctatcagataacaaaactgcttcatcaacgtcatgtgtcaccattacggcggtaacttggttttcttcacaaatttgcattaattgttcttgcaaattaccgcgagtgagtgcgtctaatgctccaaaaggttcatctaatagtaatagtttaggacgaattgccagagcgcgggcgatcgccacccgttgtttttgtccccctgataacattgctggttgtttatcagcatggggacgtaaacccaccatatctatatgtctttcgacaatttctttacgttctgcttctggcattccatttaacacagaattaaccgccaaagcaatattttctctgactgtgcgccaaggtaagagagaatagttttgaaataccaccattctatctggaccaggttttttaattctttgaccttccagagttactaaaccttctgtgggcaaatctaaaccagcaatcatatttaaaagggttgattttccacaaccagagtgaccaattaaagatataaattcaccctttttgatttctaaattaatgcctttgagagcgatatattgaccgccgcctgttaattcaaagactttatcaatttgatctacagcaacaaatactgacatagttttggtaattggtaattggtaattggtaattggtaattggtaattggtgattaacaattacctaatttatttgctgaaagctaatagctgactgctgatagctaaaaattatttttgttctggaaggatgaggttttgtaaccaagccatgaatttatcaagtaataaacccacaacaccgatataaaccagagccaaaataacttcactgacgttattattttgataagcgtcccaaataaagaagccaataccaacgataccggacatcacaatttctgccgcaataatcgctaaccaagctaaaccaatcgcgattcttaaacctgtaaagatgtaaggtaaagccgcaggaattaagatgttaataaagtattctttttgggaaagttggagaactttagcaacgttattgtaatcactgggaatttcttttacacccactgctgtgttaatcaaaattggccaaattgaagtgatgaaaattacgaataatgcggctggttcgttttgtcttaaagctgccaaagaaataggaacccaagctaaaggcggtactgttcttaatagttggaacaggggatctaaagccttagacattgttttgttaataccaattaacacccctagagcaatacccacaatagcagctaaagtgtaactgatagctacccgttgcaaactagctaaaatttgccagaatagccctttatcaatgccacctttgtcataaaaagggtaaattattaaaatccaagtatcttgaataacttgaataggtccgggtaaagttgcaccgggagtccaggcgaataattgccaagctgcgagaaatacagcaagggcgatcgctggtggtatcagttcaggaaattgcttttgtaaattggatataaaattgttatccagcttggaacttgcagggcgtttttgggctattgtcatgggatgttctctcctaaaattggctgatgattaatgataaataactaagcactaactttcttaattgtcaaactcttgatgtatgcctctggatcttcaggatcgaattttacaccatcaaagaatgtttcgacaccgcgagaggtagtagcaggaatatccgcagtaaaaccagcttcttttgctgcttctttccaaatatcttcccggttaactttatcaattaaagctttagcttttgcccctttattagcaatgtaatcttttggtaaaaagccccatctcacgctttcagtgataaaccataaatcatgactcttgtagggataagaaacactacctttaccatctttccagtacaaagcagccattgttttatcattaatcttacggccatctcccatgtcataagtacccatgaatggttccatcaaaatctcaacaggtaagttgaaataatttctgccagctaatatttccgccgcttctttgcggttatcaaaattatctaaccattgttgtgcttccatgatgccttttaataaggcttttgtggctttaggatgttgatcaacccagtctgcacgcatggcaaaatattcttcggggtgatctttccaaatttctgctgtcaatgcagccatgtaaccaattttgtctttcacaattctataaggccaaggatctccggtactgaaagcatccattgttcctgttttcatgttagcaacggtttgcgctgcgggaactgttaataatttaatatctgtatctgggttaataccaccagcagctaaccaataacgaatccaaaaatcttggttaactccaggaaatgtttgcgctgcggtaaatggtgtgggggatgattttaattgagcaaataaagatttagctcctgcaagttgcaaagttacacctttacctgcgtgtttgttagcaatggcaataccattaccatgtgtgattaattgacataaaacatacatgggaataggtttattacctttagtaattttaccttcggtaattaaatgtggcatgggcatttgccattgtccaccatcaatcccaccaccagcagaaccaatttctatattatctctagctgaaccccaagaagcttgtttagaaacttctacatctgtcatgccatatttggcaaagaaacctttttctttagcaataattaatggtgcagattcaacgatgggaatataaccaagtttaacttttgtagtttctggttgttgttccgcactaatattagctactggttgagcagtattagttgtattcgtaccgcctgtgttacctgcttcaggaggattgcctagacagcctttcaggaatactgcacctgcggaagctccggcagtaacgataaatttacgacgagaaatttgattcaaaaagtcagacataaaatacatctcctggttttgcaaatctattttttagccatgaaaattaccacaagaaaaatttatttcttgcacttgcatacaatatattcagtcgtgataagttctcattttccgtcggacaatgcctaacttagctatgaaaacaaaggcggattactgtgatttgttggatgagttacaaaaaatttctcaaccattgaaaattagtttacaggtttttttaaggaatgcaactacttggagagctaaatcttaaatgaatattagattagacatataagtaaaaatttataaatagagataaattttgctaaaagtttctaatatatatcttgagactgatgattatgattaggtttaggctatgcaatccgtaggtattggtttagtttattaccctcaaagggcatgatataaataattttgatattctctataagattaaatctgcaatcatagatgaatcttatttggtgactggtgactggggaaacaggaaatatttatctttctcctgactcctgactcctgactgttgataactaataactgatataaatgaacactaatgaaaattattgcttatagctatagtgatccactattggaaactactcccgatgaagctagttggggttgggaagtagatcacatttatcaagactggggagcgcgatcgcaactacaacaattaataagtgactgtgaaaccgaacctgcaaattatctgttgattcgccgtttagaagaattgggagatacattagcacaagtgagcgatcgcctcaaccaattagaagctatgggcgtaatagtcattgctactgaacaacaatataaatccgcagatgctaaattccgtattgatcttttcaacttactccaagaaattcaacgtcaacaacgtagtcgccgcatccgtcaaggacacgctaaaaatcgcatcgaagccttaccacctccaggtaaagttccctatggctaccgtagaaccaaagacaaatatattattgatcgcagtacatcacctatagtcaaagatttttttgacaactttctactttatgcttctctacgcggtgctgttcgttatctagccaaaaaatacgctaaaaaaatctctgtcactaccggcagacgttggttaacaaaccccgtttatcgtggtgatacagcttatcaaaatggagaaattatttctgacactcacataggtatcatttccagggaagaagcagcgcaagttgacagacttttacgccgcaatagtcgtttaccatctcgtaccgctagtgcgccccattctttagcggggttagttgtttgtagtcaatgtcagtctagaatgatagtcactcgtgttacccagcgttttcaagaacatgagtatttatatttacgcaatacaaattgtccccaaaatcctaaatgtcgtgctattccttatcaagatgttttggaaaagacaattgaaattgtttgtcaagatttacctttagcagttgcaggaatgaattttccccaattagatactattaaaaatagtttaaatcataaaattgcacatcaacaacaaatccttgaacagttacccaccttgatagaaactggagttttagatccagaaacagctaaaatcagagcttataaacttcgcacagaaatttctcaaatgcaagccaaattagctattctcccccctgtgaatttgcgtgctgttgctgaagctgtttctattccccaattttggttagatttatcagaagtagaaagacgattttatttaagagaatttatccggcaaatagagatcattcgtcaaggtgaaaactggcatttacaggtaaatttcattttttaataagttttaataagttttaataagtaggggttgctgatagcggagcgtggtgtaagccttcaataatggacaattacagctattttcaggtaaataaaccacattttgatttaggtttcgcgtcaaaaatgtaggggcgttcgcgaagcgtgctggaagcatcagcattcggacaattaattatcggtttttaccgaagactatcatccgaatgcttcgccctgactgtggtctaaagacatgaaaactgctgtaacaattaaaaattgacaatgaaacaattatcaattatcaattgtcaattgtcaattatcaattgtcaattatcaattatcaattgctaaactggatcaaacctgatacttctcagacatcctctgactccttgatctcctacctaaagaatttgtgataaaaacttctttgttctctcttccttgggttcagtaaaaaacacatcaggagttgcttcctcaaccaaaaaaccaccatccaaaaacaccaccctatcagcaacttcccgcgcaaaaccaacttcatgagttacaaccaccatcgtcattccctcactagcaaggtttcgcatcacatctaaaacctctcttaccatttctggatctaacgcagaagtcggttcatcaaacaacataatttttggttgcatagctaacgcacgcgcaatagctacccgttgttgttgtccccccgataactgtcctggatatttatttgcttgggctaaaattcccaccctttctaacagttgcattgctaattcttccgctttttgtttcggtaatttacgtacccaaatcggtgctaaagtgatattttgtaaaactgttaaatggggaaataaattaaactgttgaaacaccatccccgcttctctgcggacagcttcaatattttttaaatcactacttaaagtaattccatcaatagttatttttccctgttgatattcttccaaagcattaaatgttctgataaaagttgattttcctgaaccggaaggacccattaaaacaacaacttcaccccggttgactgttaaactcactcctttaagaacgtgaaatttaccataccacttatgaacatcctcagcgataataattggtgcttttattgtttcttgtgctttcatatatttcaacctcaattgaataattgtctatagctgtatacaagttaattaaaacatttagtaaaacgataacttatacaattaaaagcttttaatactgtcacctgtcacctgtcacctgtcacctgtcacctgtcaccttgcttttctaacctgcgagaagctaaagacattgaataacaaaatacccaataaattgccccaataaatatataaacttctgcatatctccctaaaaatcgcggttgtgctaaaatagaacgagcaattcctgttaattccaccaaacccaccaaagataacaatgaagtatctttaaataaacctataaactgtcccacaattgccggaactacagcgcgtaaagcttggggcaatataattaatattaacactaaaactgaatttaatcctagtgcctttcctgcttcaaattgtcctctaggaattgattgtaaaccaccacgtacattttcagccatataagcagcactaaataaaaccagtcccgcaattcctctaattaagcgatctaaacgtaaatcatttggtaaaaataaaggtaacataacttgggcaataaacaaaattcctattaatggtagtcccctaacgatttcaatataaagaatagaaaaccagcgaattatcaataaattactggttcttcctaatgctaataatactccaatgggaaaggaaagaacaatactcacaattgccattaataatgttaacatcaacccattccacagattggtggaaacagattttaaaccaaaacctcctccaattaaccagatattaattgcaaaagataataaccatgctggtgcaagccaaggtgtgataaattgagaaaatcggtttttgatgacattttgttttttggtaaataaactccaggttatcacacttaaagttgtgatgattcctaaaactatccacaaacgccaatataaggttttaggaaatctccccactaaaaataaatgtaaattggcttgaataacttgccattgtgcttgagtaaatacccaaactactattcctttaattatccaaaagagaaagattaaacacagaatagttaatactgtattataccagttattaaagagatttttccttaaccaagttaatttattcatgggttattgtttatttattgttgttctcgttctcatactttttttctcgttcccatacagagtatgggaatgaaatatagaagactctggcttctattaaaccatagtcagagactatgtgatagcattcccagtcagagactgggaacgagataattgtcaattatcaattgtcaattgtcaattatcaattgataactatctttctttgatctgaaatttatgattgattaaattcatcatcaaggaaataattaaactaagagtgagataggtaagcataattaatatcatcacttctacagcttttcccgtttggttaaatgtggtagaagcaacaaaataaatatctggataaccaatagcgatcgccaaactagaatttttagttaaattcaaatattgactggtaagtgggggaataattacccgtaaagcttggggaaaaataatcaaccgcattaacaaagttgattttaaacccaaagataaacccgcttcccattgtcctttagctactgattttatcccacctctgacaatttcggcaataaacgcacctgtgtaaaaagttaaccctaataacaatgtcgaaaattctggagttaagttaaaactcagaacttctaaaccattttgactaagattaatgaaaccgaaaacagaaattttattttctaaatttggtaaactcagaaaaactgcaaagtaccaaaataacaactgtaataataagggtgtgtttctaaaaatctccacataaactaaactgatatttctcactaaccaattatcagataaacgcgcaattcccgcagttattcccacaattgttgtgaggataattcccaaaattgctacacgcaaagaattaattaacccaacccataaagcacgcagataggtatcagtgggattatagttaataggagtttcgccaatatcaaaagacgcttgttgctggagaaaatcaaaaccaaagttaattcttaattgctgtaagttgcggttgacatttatccataaaatagtaactatagctattgctaaaatgacagctataacttgtgttgcaatttgcaaaaaacgataatcacgccatatcggtggtttggaattagtcattattcattagttatagtatttaccaagctagtgaggtacagagttttttatcttagggaacagggaacagggaacaggaagtaacatattattcttcccagtcaccagtccccagtcaccagtcacaagtcaccagtccccagtcaccagtcaccagtcaccagtccccagtcaccagtccccagtcaccagtcaccagtcaccgaaatggaggagaatagagtaaaccgccttttgtgtaaagttgattgttaccacgggggagattgagttttgtgtttgtacccaggttgcgatcataaatttcgccatagttaccaacgtgcttaactattctggctgcaaaatcattagttaaaccaattccttcacctaaatttccttctgttcctaaaaaacgcttaatttctggatcattgctattagcaaattgtcctatattttgggaattaattcctaattcttcggcttttattaaactataaactacccatttaactacattattccattggggatcaccttgggcaactgctggcgctaaaggttcagaagatagcgaatcatcgagaatgatatgatcatcaggtttgggtaaagttgtgcgtcgagaaaccaacgccgaacgatccgcagttactccatcacaacgcccttctgcataagtggcaaaagtaatattaatatcttcaaaaacaacgggtttataactaatgctttgttttcgcatttgatctgctaaattttgttcagtagttgtaccagtttgggcgcaaattgctttatcttttaaatctgctaaagacttgataccgctatttttgcgaaccataatagcttgaccatcgtaaaaaaccacaggggcaaaatttaaacccactgaagtatcacggctgaacgtccagctagtattgcggcttaataaatctacttcaccagtttgcaaagctgtaaatctttctttagcatttaagttacgatattctacagcatcaggattgtcaaacaaagccgcagctacagcgcgacaaatatccacatcaatcccattatattgaccctcagttcccacaaaactaaaacccggtaactcaccactaacaccacaaattagctgtccactggttttaactttaccagcaatattgcgagttacttgttgtacagtgttagtggctgtattttccgttgtacctgaatcaccctcacaaccagcaatagtaaaaatgaaaggagcgatcgccagcaaaaaagttaatttacgtgcaagcataacttaaaataaataaatgtgtttacagcagattgcatatcaatagggtacaaaatctcaattgaacctactaactcctagacagaaacagagttttacccctgacttcttgatctcctgactccttgatctcctgctgtaataagaatgtatctaccaaagaatagaatacaccttgaggacaactcactacacaagtaaattcaatgcccatagcaggttaaactaggtgtggtgacagtcgctccaccgttccttatgaggcttttatgggagctaatctgaaacaaatagccaattacttagataaccttggctgggaataccgctttgatgaagcagaagacagaattatcacaggtgtagaagctgatcatctagacgattttctcatagtcgtgcagttggatgaagacggaaaatttttccgagtttttgcccctcaagttctagcaggagtcaaagaacatccttataaagcttctattctccagacaatgctggccatttcttgggaaaccaaaatgctgcaatgggaatatgatccctccgatggcgaaatccgtgccattatagaatttcccctagaagactccatactcaccgaaagacaatttcaccgttgcctaagcgggttaattcaagttgttgatagcatcgccttaccgcgactcaaacaagtgatggccacaggtgaagatccaggtaatatagaactaggggaaagactgttactcagtattcaggaagaagccccaggactactggatctattagaaaaagcaatggaagctcggaaaaagcggggaagttttcccaatgagtgaagcggatcattgctgaaatagctatcacaggcttcgccttgaaggtgagagtgtcaaactccgaagtgataacctaactaatatacagaaattttttagggctggatttttatgacatcctatacaacctcctcagctaaagcggaaatgagtgaacttcggcggttaaaaagcttgctaccaccagaattacaaagctgggtgacagtggaaggaacaaccgaagtaagtccacccctgatccgttgcgaagaaattggcaaagaccaagtagaaattcaaatcgacttggtaaaatgggatgctttagcgatggatcagcgtaatctcctattttggcatgaagttgctcgtatccaaaatgacaccattcctaaagatggttgggaaatggccgcactggctattggtttaggtggtgctgtaggtgaattatgggtacaggatggcttactgctagtgttagcgttggcgctttgtggtgtttccggttggcgactctatcaaaaaaataatggggaaaagcaaataaaagaattaattgatgctgacgaaaaagcgatcgccctggccacccgttttggttatagtctccccaacgcctacaagagtttaggtagtgccttaaaaaccttaattgacaccacccccggtaagcgtcagcgttcccgctatgaagccagactttccgccctcaaacgcagcgccaacaaagcaaaagccaaatctagacctatggacgacgcaggactgtaggaagcagggagcagggagcagggagcagggagcagggggcagggagcagggggaagttaataacccaatgcccagtcaccagtcaccagtccccagtccccagcgatgcactgagc

SEQ ID NO: 59 - DNA, 34325 bp, Sphaerospermopsis sp. LEGE 00249
  LEGE00249_74
actggggactggggactggggacacttcgacaagctcagtgcatcgctggggactggggaaaatttttatatcctgactcctgactcttgaactcctgtctattaaacccatatcaaaatccttaactaaggagatcaacaaaatgtcacaagaagagttgcaagaaaaaatcttaaattcactcgaagaattgaaagctgatgtggcaaaatcaaatgagaaatttgaggtatacaggcaagctacgcagtcactggttaatctggctttcggtttgattgccagtgctacgataattacggtctttcttaatcctgacttcaactaaccagtttagcatttttgccgttttttcttaaccagaaatgaatacaatgactgttaatgctagataataggaaagccttaacatttactaacagcccggaaaaaagaactaaattactatgcgaactcactattgcggcgaactccgacaagagcatattggagaaactgtaacattatacggttgggtagaccgtcgccgcgatcatgggggtgtgatattcttggatttacgcgatcgctctggtattgtgcaaattgtcagcgatcctcaacgcaccccagactcctacgaactggctaacaccatacgtaatgaatacgttgtagaaattactggtagagttacccaacgccccgcagaatctttaaatcctcgtattcctactggtgaaatagaaatttacgctgataaaattcacatcctcaacgctgtgcgtaaacagctaccttttcaggtttccaccgcagatacagaaaatgtgagggaagacttgcggttaaaatatcgttatttagatttacgacgcgatcgcatggcgcaaaatatgcagttacgtcaccaagtcgtgaaagcaatgcgtcgttatttagaagataacgaaggtttcattgaaatagaaacacccgtacttacccgttccactcccgaaggtgcgcgtgattatattcttcccagtcgcgttaatgaaggggaatggttcgctttaccccagtcaccgcaactattcaagcaaatattgatggtatccgggatggatagatactatcaaattgcgagatgtttccgtgatgaagacttgcgtgcagacagacaaccggagtttacccagttagacatggaaatgagtttcatgtctcaagaggaaataatagaactcaacgaaaaattagtttgtcacatcttcaaaaccgtcaaaaatattgacttaccccgtccttttccgcgtctaacttataaagatgcgatgaataaatacggaagtgataaaccagatacccgctacggtttagaattagttgatgtttctgatgttttaaaagattccggttttaaagtttttaatgatgccatttctaaaggtggaattgtgaaaattctacctattcctaacggtaatgatgcaatttcaaatgttcgcattaaaccaggtggagacattttcaaagaagcagcagaagcgggagctaaaggtttagcttatattcgcgtgcgggaaaatggagaaattgacaccattggcgcgattaaagataatttgacaccggaacaaaagcaggaaattttaactagaactggtgcaaaagacggtcatttattattatttgctgctgctgatataggaacagtaaataaaacattggatcggttgcgtcagtttgtggctagggaatttaatttaattcctgaaggaaaaaataactttctgtggattacagatttcccgatgtttgaatggaatgcagatgagaaaagattagaagcattacatcacccatttaccgcaccccatcccgatgatttgcatgatttgaaaaccgcccgcgctcaagcttacgacttggttttaaatggttttgaagtgggtggtggcagtctgcgaatttatcaaagagaagtgcaatctcaggtgtttgaaaccattggtttatctaccgaagaagcacaaaataaattcggctttttgttagaagcttttgaatatggtacacctcctcatggtggtattgcctatggtttagatcgcttggtaatgttgttagctggagaagaatcaattcgtgatgtaattgcttttcccaagacgcaacaagcacgctgtttgttaacagatgcacctgctggtgtggatgcaaaacagttgaaagaacttcatgttgcttcgacggtgaaacccaaggtgaaagagtaagtttaagatccccgacttctgttaagaaaattaagaagtcgggaattttatgctaaaatccctactaaaattttcattaatatttctaagtcggtgggaactcgatataacattaagtcttgagttatgattctagtatcacgttgaaaactgccaaattgccatatatcccctgtagtgactgcaccatataatattggttcatctgttgatatccattcattgactgcaattaattctactgcaagttgagtaaaaccccttgttaaatctgcttgttttgcttctaccactaatatttgatgttgagtttgcaggtaataatctaagtcacctcgcaaaaattgatttatttctatgggatattctatattaattgttgcttgggtaatgtgggcaatttctaataaaataggagcaattaatacttctctgcgtgcagcttcgctagttaaactgactctttgaattgcttcttctaatctttcttttaagtcatttagtctagtaatttgattgttagtggttgggaaattaatattacttttgattaaggttgatcctagttcttgtaaaatgtccgcaggtgcaaatcttaaatcaaagtatttacgaaatgtgtaggtttcagtaggtttgagaatttgcggacgatggggggtattcataaggttgtaagttatattgtaattgtagatttttattgtctatattatagattttatttcacgcagaggcgcagagacgcagagaagagagaaagagtgtaatagaactctccgaaaaagatgtagggacaattcatgaattgtccctacgaatgggtttcaggttacgcatatttaattttcggagatgtctattgagatattgaaggtgcgattttttgggatgaaggagatggatcgctgtttggtgaggtggagagatgggttagtggtagcttaccgtaagtatcgctaactacttcaaaatatttaactccaaaaaatgtcatttaataatgtgtcaatatcacaatcaaactgccataaatcaggaaactcatactgtggataatcttctcggatttccttgagtacatcttgccagatctcgtcaaaaatttcaggcaaataatttttaagactaggtgactttgctaaacgtcgtttaatttgtttacgttgttctctaatagttctttcccaaccattgtaatcatttactaaaggaacatataatcgtttcaaaatatgcgataataatacatccaaacgactttccaattcatcccgataagatcgccccaaatcctcaatctcctctatcaaattctcaacatccacattttcaaagtccctagcttttaatttagctatagtctcttgagtccaatgtaaataatcagattcatataaggattttttagcaattacttgagtcattgatttgtagctcctgcaataaatccattattatattaacattattgctgatcacatagctatgggtaggggtttagcattgctaaacccctataggattattgtagtgggattttaatattattccctttaccgacaaacttctaccaaagtgctggtaaaattaggataagaaatagcagccgcttctgcacggtgaatagtcgtagtaccactagcattaagagcagcgatcgctagagaagagcgcaagagtgtggtataaaaattatagtagatttattataaacaacaatgtctattcctgattttcaatctgttatgcttcctttactccaatatgctggtgatggaaaggaacattctttaagagatgctattacatttttagctgatgtttttaatttgagtgatgaggaacgaaaggaattattatctagtggacaacaagcggtttttgataatagggtaggatgggcgagaactcatttaaaaaaagctggtttattagagtctcccaaaagaggatttttccaaattactaacaggggaaaagaaattttaaagcaaaataaccctgaaattaatgtcaagtttcttaatcaatttccggaatttatagaatttaaaactattaaaaaagataatgataaatcagaatcagaaattacggaagattcagaaattttggaaactacaccccaagaatccatagagtttggttatcaaaaaattagaaaagaattagagttagaattattgaaccgtgtcaaaagttgttcacctgacttttttgaaagattggtagttgatttactggtaaaaatgggttatggtggttcaagacgtgatgcagggagagcaattggtaaagctggtgatgggggaattgatggaataattaaagaagataaattaggtttagatattgtttacattcaagctaaaagatgggataatacagttgttggtagaccggaaattcaaaaatttgtcggtgctttacatggacaaagagcgagaaaaggtgtttttatcaccacttctaaattttctcaagatgctagagaatatgtatctataatagatagtaagattgttttaatagatggacaagaattagctcaattaatgattgataatcatgtcggtgtatcaactgtctctatttacgagattaaaaaaatagattcagactattttacagacgagtgatcaaaaacctcaatcttcctctttgcgcctttgcgtctttgcgtgagatatataaaaaacaggggaaaattgaaaatcccctgtcacctttaccgacaaacttctaccaaagtgctggtaaaattaggataagaaatagcagccgcttctgcacggtggatggtagtagttccattagcatttaaagcagcgatcgctaaactcatacctatgcgatgatctgtatggctgtctacttccgcacccaccaaagcagtaccaccaacaatttccatcccatcgggtaattctgtcacttttgcacccattttattgagttgttgcgccattgcggtaatgcgatcgctctctttaactcgcaactctgccgcatctctaataatagttgtcccttcggcaaacgtcgcagctacggctaaaatgggaatttcatctattaatctcggtataatatccccagcaatggtacagctttttaactgactagaacgcacccgcacatctgcaaccggttcccctgcaacttcccgttggttttctagctggatatctgcacccatcatagccaaagcttctaaaattcccgtgcgggtggggttaacaccgacattttccaccaccaactcagaaccaggaacaatagaacccgcaactaaccaaaaagccgcagaactaatatcaccaggaacaacaactttttgcccgtataatttggcatttcccgtcacggtaacgctgttagtttccgggtctatacttaattctgccccaaaagcttttaacatccgttcactgtgatcccttgataaagcgggttcggtgactgttgttttcccttcggtgtttaaacctgcaagtaaaatacaagacttcacttgcgctgaagcaatgggtgaatgataatgaatcggtttgagtgcttgtccttgaactgctaaaggtgctagagtattacctttgcgtccccaaatttcagcggacatttgttgtaaaggtttaacaacacgggacataggacgcgatcgcaaagagtcatcaccagtcacagtaaaaaaccgccctggatgggaagctaacaaacccaacattaaccggatagttgtaccagagttacccgcatttaatacatccattggttcttggaaattacctaaaccaatacccttcacccgcaccaactgggtatttaattccgaaatttccgcacccagcgcctggaaacagtgagcagtgctacggggatcttcacctaaaagcagtccttgaatctcagtttcaccttcagcgatcgcacctaacatcaaagcccgatgggaaatagatttatccccaggaatactgatacgaccttgtagagacagtccagagggaggacgctgaataattaagttttgagaagcgttttcttgagtttgtaatgttataatagcagccaacattaggatacactagcttttgaatagaccggaaattttgcagtgacatctaatgccgccactggttaattccttcctagtatcctaccgctttttattgtccgcaacccaatccaatcagccccagtttagactagcatttttttaaatcttgataaaaatattcacaaccttgatccacagactgattctagccagaaaaaacattgttttcgggttttagcttgcaatcctagccgtttgcatcttgatttgtgtagattaacaaattagtagattcggttaatatgaatcaggttttactatttagttgtttaaactaactttttaaaacacctagtgttggtttgattttattcaactgcttctatcacttatcgttcccatgctcactcatcaccgcaaacctatttgtttatcaattatttccactgacttaccagtttggtccgtagtggaaacttctggaacattatatcaaaaagatactgacagatttcacttactattgactgcaccacctttaatcagttgtgaagtaggaaatttaagcagtcgagaaaatcctgttcctcaaactaaaaaaaatgttgaaatccccacaagtcccagaattttgtggttggaaatttcaccctaccgaatcattatgactatgcaaggtaacactcaagtaagttaccgacatttctgggaacagggcgtttatggcattagtcgttattggttgcctaatgaatctttgcaaccacacaagcctattcgtttacgtaactttactaatagcttagatcttaccggacaaaaattaccagaacatctgcgacttgactatgaattgtggtcagaaaaggtacaactaggacgctatatactgaatttggaaattgataactaattaggggttgctgagaaagtctttccgtgagggcataggagtcaggagtcaggagtcaggagtcaggaggagatttgaaaatttctttgccatctcttgaaatcccaaaaaatgcacactttttccggtatacccttcaaaacccttgcactaatttctgtgtttatcagcctctaacctttgatatatcaaggttttaggtttattcagcaaaccctaattaggcttattgagtcgtttttaggtgaaacattctgctcttttttctcgtttctcgttctcatactctgtatgggaatgaattctagaaggctatgccttctattaaagtagaggcagagcctctataatgacattcccagtcggagactgggaacgagagagcgagagaaagcttttgcgtgagaatatggttctacagactttggaaatatttatccaaagcttcgtgtactaactctgtcatgggtttattgagtttttctgcggtttctttgagttgggaataaacatcatctcgtaaactcaccctatgacgtgattttccgctgctggtgggttctcccggtgtataagtggctgaaaattcacggatagcatcaaaaccaatgcgatcacaaaaatccccaaagctttcttttcctttccgtgattttttaaagaagacaaaaatcggctctaaaaagctttcgatgtcgttgtggtgcaatttttcaatgatcggttgtgctaaccgcgtttgatctggtgaaccacctaaccacacttgataagattccggcgcactacctacaaatcctaattctgccatataaggacgagcgcaaccattggggcaacctgtcatccttaccacaaagtggtctttttgtaaacccacttgatctaataaagcccggattctttctaaaataccaggaattgccctttctgactcggtaatagctaaaccacaggtaggtaaagcgggacaagccatagcatagcgggttaaagctgcaatttgactaggatcagcaataataccgcatttatctaaaatttcttgaattgcttctttatcttctggtgcaatatcgtagaaaatcaggttttgatttggtgtgagacgaataggtaggttaaactgtgcaacaattgtccgcaaagcggttttgagttgaaaagaaccttcatcttttacccgaccattatcaatggaaatacctaagaacagtttaccgtccccttgttcattccatcccagaaaatcttgatatttgaatttgggtaattgtttaaaaggttcgacagctttaccaaagtattcttccaccttgctgcggaatttttccacaccccaatcattgattaaatattttaatctagcgtgtcttctgtcggtgcgatcgccataatctctttgagtggcaactatggctttgacgatatcataaacatcatcttttgccacatagcaaatcggatcagctagtcgcgcaaaggtttcttctttattgtgggttcttcctaaaccaccaccagcaaagacgttaaaaccttggagttccccttttttattggtcattactaccaatgttaaatcttgggaatacaaatctacagaattatcaccaggtacagttacgcaaactttaaatttgcgtggcatataatgagtaccatagattggttctacggaatcatgaaaaatagtcccagtgccatttttttgtcgtgctgctttcacatctgggtgttcttccgcactaatggctttttccccatccaaccaaatttcataataagcaccggtttggggtgaaagcaaatcagcgatattttgggcatattcccaagcatactgatattctgagcgatttttaaagggtgcagggggagccataacgttacggttgatgtcaccacaagcacccaaagtagaaccgagattttttacaatagtagcgatcgccgctttgagattctttttcaaaatcccatgtagctgaaaaccttggcgggtagtagctcttaacgtatgattaccatattcatccgccaattgatctaaagccaaatatagctgcggtggtaccaacccaccaggattttttgtccgcagcatcatttgataatctttttcctgtcccttaacacgattatcacggttatcctgttgataagatccgtgaaacttcagaatctgtatagcatcttcactaaaatgggttgtatcctgaagtatttcagtcgctacaggttcacgcaaaaaattactattttctttgagaccttcaactttagaaggtttacgggtactaacgggagaaggcgcagagttaatcattacagtagtatgtttgtcaataatgcagcagttaaagaataattaaagatttagctatactttttctgctggtagaacaccaaaaatccgctcggaattatgaataataacttaattttaacacagttaaaagccggcttcattagtgatatcacacttaacaaaaccagctatttcagtattttagatgtaaatcaacagtcaggaggcaggagttcaggagttcaggagttagaagaataaataactaatgtttctttcccagtccccagtcaccagtccccagtccccaatcaccaatcaccaacttacttaaagcgataaccgataccaccattaatgctcacagcagaagcatcactattttgataagcaccgagtcctactttagcgttagtgtaaaccaggaaattcttagtaacttcagattctaccccagcaccgacaactacagaatctctattacccaagggagtgggtttaccgtcattttctacgaaagaatagccaccagtaacaaagacattggttttattagcaatgggtaaatctacagaaacttccgggatgatagcagctgtttcatcaccccagaggacgttaccccgtgcggaaaaaggagtatttcccaattttaaacgacctgtgacattgccgccaaaggtagcatcatcgttaccttgtccaccactggtaacaccagcagctacaccaacaccaatataactagcatctgtgcctttttgagtttcggcagcagctttacccacggaaagaaatgcaggagtaattactaaggaagataaagcagaaattgtcactaaagacttgagtaagcgtttcataagttttaccacaatttagaagttttactgttaaattctaagtcgaatcggaagttgaaatgttccagatgatttgaaaatttactaaattcattgttactattaatgcaagatgttgaacttatcggtatttagtaaacttttgcatccttggttatagttacactgccatctttgagtattccaggtgatcagatgacagtttactaatcgtcactgagcaatataaaatgatgataaaaactacaaaggtattatcgggtttgctgggtgtgtgtgttggtgatgctttgggtgtaccggtggagtttacaagtcgtgcagaacgtctcaaatctccggtcacatctatgttaggttatggtacgtggcatcaaccaccaggaacatggtctgatgacagttctttaactttgtgtttggcagaatgtttgtgtgatggtttttccctagatgctatagctcgttccttttcccgctggtacacagaaggttattggggcgctcatggtaaagtttttgatattggtggaactaccagacaagctattattaattggcaacaaggagcaacacccctaaaagcaggtggtactggtgaaaatagtaatggcaatggttctttaatgcgaattttgccaatggcttatttttatcaaaccttgacttttcaggaattaatagaacgagtccatcaagtttcttgcattactcatggccatctgcgatcgcaaatggcttgtggcatttatattagtattgctgtagagctattggcaggaatagaacccaaagcagcttatttgcaagggttggacaagattcaatcactctattctagtggggaatatgccttggaaaaaccccattttgatagagttttcagtggaaaaattgctgatatacccatcaaagagattaattctggtggttatgtaattgataccctagaagcatctttatggtgttttttaaatagctcatcctacgcccaagctgtacttcaagccgttaacttaggcggagatacggatactactgctgcggtgacaggtgggttagcgggaatttattatggcgtggaaggtattccttcagaatggctggatcaaattgctcggaaacaagacattatagacttgagcagtcgtttgtcattatttatagggaatagggaataggtaatagggaataggtaataaatgaactcctgatttctgactcctgactcctgtaagggcgaagcattcgggcgaacaattattaatttttctccaaagctattttccgaatgcttcgcccctactttgcccttacgacttctgactgctgactgctatacataacgaaaagactattatatttttacctgttcattgatccattgttggtagtcagtaccagcaaggagaataggtagagcgataatttctggcagttgataggaatgaatttctctgattttggctgctaatgtagagaataacgccaaattagtcttaatcattaactgccattcattctttttgtgaatttctccttgccatcggtaaatagagtagacgggtgacaaactgacagcagctgcgagtttagcttcgatcacagtttgagcgatcgccttagcttcttcttcagtggcagttgtcaccataactacaccataaccagttggttgctgcaacattgctaaaccagagacagagagtagacttgaccatcaattaacaagcgagtgatacctttggcttggagatggttactagccttatgcagcattctactgtcaggaactttaatcacgcgatcgcgtttggtagaaaagcgtttggccacgcgatgattatcaaacactggcagagttttctgctgggtttcaatagtaggaatagctcccaagtccccaaaatccttgagtggtctagtaattaattccgcagagcgatcgattaccagataacaagttttcggtaaagatgccacagacaagggtaaaacttgaactgctccttctcctggtctacgtctggtaactagaggtgtaggttcttcaaaatcttcgtcttcaaaatcctcctcatcttcaaacaaatcatcgtctaaatcatccaaatcatcagactcatccagtaaatcatcatcgaacatattgctgatgacgttttcttctggctcctcatcctctagtatggttttgggaatgctgggtatttcaggtggccgatgtcggacgatttctatttccctagctaccggcaattctggtttttccgtggcagaagagcgtgttttcacccttctaatagccgggataggaggtggaatttgttcagacttaggagcctctttcacctctttgatgaccgttttaggtggttcaaccttgggcaactctaagctaggttgatcactgcttacaggtgctgtttcgatttttggttgttgactcaacaggggtaactgctcgtaacttacctgcgctctgccttcaggggttctggcagcgcgttttaaagaaacaagatattcgtaatcttcttcgggtaaggtacttttaagcagtcggctaatggttgagttgcttactccataacgttctgccaaagtcgaggtagtttcggcagtttctctatataacttgagaatttcttgcttgtcagaatctgttaattttctcacggtagacaccaaaatttgttaactgcgtttgcgtccactggtacgccgcttgaggctcaatgatgcttcgtattccagagcagcgcccataccaaataacactccactaaacacccagaacacttctagtatgtctccactttgataatttggaagatagttagtggcatatttaaaccacatatctgcaatgtagagcgaaaatgctgcggctgcaatcattctccatgaccgggaaacttttcctccccaaaacgctaataacatgattgtagcgataattaataacaacacatcactaattacataaaaccaatctaaaatcagttttatttgcatcaaaataccacttgtttgagcggatggtgctgcattttgctgagaaatgaaccaagccacaaaacttcctaatgcaccaacagcaaacacaattaaccattgccatttttctaagttgatgcgtcgggagaacaaagctagagccatacctccacccaggaagatataagtcatgacaaaaaacacatctgctatagacacatccggttcttcgcctaaacctatttctatatagccaaaaactatcccaccgataaaataagccagcatacctaagccgataaacagccaaacctttcggctgctgataatttgggtactttgccagtttcgccaacagagaacagcagaacccaagtaagctgaagcttcaaagatattggttcctagtaaataccaaacttcacgaatttcttcgccgttgggaccaccagggattttggcgctgaacaacaagaagtataacagggctaacattgcccagccaatactaatcaaaatgattctttgagtcgtgaaaatggttttcgctttgtaagaatcgtcgtaggatttactcataggttttcactaggtaaatgcactgtactactatttttgacataattaaggtcttatgtaattgaaatagtattaattgctcaatgtgatacctgaagttgggtaacactgaaatcatttgtgagccaataatatccatcctactgccaaagtttactcagtggagattgatttaaccaaccgataaatattaatagttcttcttctggcatatcttgtagcctatcctctaattgatgagcaaagttcgtatcaccaaaatatgtttttcctagtcggtgcagttcttccaggagaataattacatgagtttcttgccaaggaggcagtttgggcatttgtgagggttcaacagttagcagagctttggctgactctggggaagatgcttggggcaattgtttttgctgtaatatccctgtgatatctttttcaaataaacctgcttgtcgattacctaataaatcttcaatatccatataaacggcttgcaggagcaaaatactcgccaatgtcaaaatctcaatattgctatggctacctgtatcactgtctagctgttccaagcgaattttgccccagacgctaaagcgttcgggttcttccagcaagacacaggctttacctctattgtcagtcagcgatcgccacagagttttggcttcaacttcttgactagctttaaaaacacttatcaggcgaaaggtttgcccctgataatggaggatcggcaccttctgatctcgcgttgggtgctgaacggtagatatttcaacatcctggcgtttaagaataaacatggcactagcaactaactcctcacaggggctgttttgatttgggatttgtctttcatttgggcaaaatggcctcaagtataataatttatattatggtgaaataaaattagacgtttgccaaatactttaccagatatctgccaaatatctgtctgagaggattagcactcaaggtaaagttaccccttgacatctcaatatatcgtaaatacctacttggtttcgttttttagtttacatctactggttcatgaggtgatggttcgttataaaaattgtgaaatatttaattctatcttgctttttactaggaacagcgtatataataatcaaggatggtttgttcaaaagccagatacgagtcttgggcgcgtagctcagtggatagagcaattgccttctaagcaatcggtcgcaggttcgaaccctgccgcgctcgttttaattcaatattcatcctcaatgcttgtaactaaggatatatgattcatagtccttggatgagaacatattttcttgaggatgctgcaccataacacaaatgattatatttgactatgtttgactatatttttgtgatttaaactcaatacccaaattactcacagatgtggaggatagcaaaaatgatgctgctttttgggctataacttcagaaagctgaacctgcttaatttttaccaaactttctttaataaaggaatctctcactaaagctttctctccactattaaaggaagtttcataaaatacttctttaataccagcagatataattagctttaaacaagacaaacaaggttctaatgttacatatatactagcaccttctgtagatataccatactttgcggcttgggcgatggcatttgcttccgcgtgtacagccctggatggtagaattttactggcatcacaactacttaaacctggatagcaatatccttgagttgtacaatgggctgaaccagatggggaaccattgtaacctgtggctactacttgcttgtttttaacaattacagcacccacgggaaaagcaagacaagttgatcgagtcgctgctagtttggccaacatcaggaagtattcatcccatgttggtctttgatggtattcttcagatgagcaaaaatcttgcatggtgttttaatttcaaactttactattctgctttgctgacaatcaaaatcttaaatgctatggcttccaattgaataaaaagttttttaattgaattaaagcatcttcacagccattaaactgtatttcagcaataacagtgggaataccgcgaggaaatcttgatatccgcttacctgtttcgtacaaaagaatgataggaatttttttactctctgcataagctaattccattcctacaccaaaagaaagcgaaccaaggtaagcaataaccaagtctgatatactcacctgatgcttatctttatcgaacacttcacgaggagtaatatcgggattatttactggatcagtgtgtaagtgcggtacataaggttgaagaccgatttcttcacaaacagaacctattttttcatatagtgctttagtttctattggattttctacgtcagtcagcgcaccagatatatatactttgtgcatttttcctagtcaccttgcattacaagttatagcatttaccaagctagtgaggtacagagttttttagtcttagggaacagggaacagtaaataagttagggtgtacctcatgagactgagaaacgctatatatctctttcaattttgaaacaacaaattttagttttattacaaaaatatgagctttaaatataaatatctttgtgcataaaaatatagtataatcatctatttgatcctggagatattgttttatttggatttgcttgtctctgaggagtcgtatctgtttttggatttaaagtagacgaatcagaagatttgaacaaagcaattaatgaaataataattcccaaagcgccggctatcgatcctattgctgaccaccgagtttgttgatctgaacctagaaaacctagtaatgtgtctttaacaccttttttaagttttttatactcatctgattcaaccatgagttttctcagtaaatctgaatcacgcttcatccaagtattttgtttttgggcaaaatagtcattgatttcttgggcattaggtcttccaatgagtacatcaagtcttgcatcacttgaacgatgggtaacattttgggacttggaacttaatttttcaatagctaaatgggcaattggattttcaacgtctttgacattaattcggacttctttgtctgaaagattatgaagggctatacaaagaacacctgaccaattaggatttactcttgtgccaatgtgtcctaaaccttccgatacaagcttaaccacagaataaagtggtcctcgaaattgattactgagttcgactgcctcatcagtccaaactagagcagtatctcttggtggtatgtagaaaaacttctgtttttcgctggggttatctggatttgattccgtttcaataggcaagcgttgctgtaatccaattgcataagcatattcactagctgttagacataattcacaagcctttatactacctggtttaagaggatgaaaaagtatacctttaccaagctccctaataatatcttgataactcaaaacagacatgaaatactccctgacctttagacagcatgagaattttctaaaattgttgccaacatggttgcttgttagcgtttattgatcttgaacataaagcttgtcaattttaatacagtttgcggctttttgcaattctatcgccaaatatgcagcatgatctggacgtattgcaggggaagcggcgcaaatttctctgactaatttcaaagcatttttaccagaataacaacccactatttccccactaccaggggttgtatgtgtgacaactatttcatcatctgctatttctattaaaaaatttcctgcggggtcagcataatctaattttctgcaaatagctacatattgttttttaataagttcttctgcattactccaagtatcatcatatatatgcgccgactgactgagagttattaatggtcccattttcaaatcatattcagaacgtccagcaatttcatctctaatatgtttttgtaaagcccttaaacccattgcatttgcaggccaagcagcgaacatatcattacttctgagagtcgcagttaatgataattcattatctacaacccgtaaccaaatatgatttaaacaaggactaccacctttttcatgatctttcacatcccataaagtcattactgcactagcagcatcaatttctccaattagtttattaattacttgttcaatttgatctcgtccaaaccaagaccgcaaacgctgaccataggtatatttcacaccttctctatagggtgcatcatctaaaatttgcgaaacatattcttctaaaaaacttctatctattggtaaataattaggttcaggaaaataaaaatcttccggttcgtcggtgacaactgccattaaatctattaattcttgccatttgccatcataacctgtaggtctaattgtgcctgtggttttaattctatgaatgatttttacccaagtttcagctatggtttttccttctattctgtgtccgtagcgtgttcctggtaatactgtgggttctatagttaacaggggaaattctaaaggtgttccccaaggttctatggtttgtttttgggcataatatttaattttttctactgcttctacaattgattttgcttctacgacttttaaggaatgacgcaatttttctaaggcatttatatcaatatcaatatctatatatccaggaatactagaacgaattacccacgattttcgcccattatcacttaaactttcttcagcaccattttggaaaaagtctaataagcattgagaagcacctgcattttgatcttctttggtagcgttgaggacaaccaaagaacgaacatgaggatttaataacaaattgcgaattagtaagtttatgcccctagtgggtgagtataactgtcctataactgcataatctgatggttgcaggtgtttggcgatcgcttgtttgaccgtccaacctgtaattacagctatgtgaccatttccgtaaatcaactggttgggtttgtgttgcgctgcatagcgaaattcagttgtatgacttatgtgtgtcattttttagctaaattccctaaaaaataacattaaactctatcacataaaacagctatctgtggaaaatttacaaattttatttttttattccctcaaaagagattttattctttacaaaaattaatttatctgttacagttcttaatatagagagaagttaaggaaataacataatggctacaaacggttctatgattgacgatcaaggcaaaatgaataactttgcagttgaacctaaagtatatgtagacgaacaaggcgatcgcacaggttttacaccttatgcagaattactcaatggtcgtttagctatgattggtttcatttctctgatagccttagaagtattcacaggacacggtgtgatcggaattttaaaaagcctgtagaaaataattaaaatctgcttacataacagcttacataacaattgataaactagagagacgggaaaattctcgtctttttaatttgggaatgtgggcaaaaaatttatggtatgttgttagcattaagcaaaggggaatctatggttttaactgcttcaacaatgttacctctaggtactaaagcaccagaatttcatctaccagaagtagtatctggagaaaatatttcactagctaattttgcagataaaaaagcattattagtgatgtttatttgtcggcattgtccatttgtgaagcatatccaacaagaattagccaatttaggaaaagattacttgaatagtgatttggtaatagttgctattagtgctaacgatgctcaaaactacccaaatgatgcacctgaatccttaaaagaaatgtccacagagttgggatttaaatttcctttgtgctacgacgaaacccaggaaacagcacaagcttacacagcagcttgtacacctgattttttcctatttgatcaagaaagaaaattagtttatcgtggacaattagatgatagtcgtcctagtaataataaaccagtcacaggtgcagatttacgcgcagcaattgaagccgttttagttgatcaagctgtcaccagtgaacaaattcctagtgtgggttgcaatattaaatggaaaccagggaacgaacctaattactttggttaagaaaattttaatcatctccagattattcacacattctgatttctgagcaggtgggaatttcccgcctgactcctgaattattaaccataaaaatccacaaataataactaacctatgaggggtgaaattctatttttctaccattgattggttgtactggacgagcatttacttgatataatttttggaaagctgcaatttgttcttcagaaacttgagttgtttctgtgagtacattccatttgacattttcgctgcatggtggtgtagttagtgaaccgatataactgaaaaaatctttatttttaggtagtaaattggcagcgttaatcgtataattttccatgtcattgatttttcccactgcgggaatatgctgccaaatctgatcaattaagggattagctgaaccttgattcatcatcactcccacaactgctaattggtttttagcattgcgatgtactaagtgcatttccagagcagatgctttattattaatagtatgttcactaggtgtatgaaaatgaaactggatgagttcatattcctcatcgttaattttcatagtgctacctgggtggtaattgacttggacagtataaccattattaacaactaataaaggtgtgggttgatagttaaactctatttttccaggagttccttctactgcatgatttatattgatgggagattgattttttcctagtttacaaagcgcaaactcagaactgatttctccccagtgagtaggatttgctgcacctgcataactccagtctggtgtattttcctcagctatgactggtgtaggaaatacagccattaatcctattaaaaatactacaattactataatatttacacacaaaaggttttttattttccagcttagtttcattctactaaaatctatacctcaacaaaatataattaaaaatgcaaaggatcacaattcaaatttcccaaattcaagagacaaaaattttattaacaccccaacaacaacattatttattgcgagttttgcgattacaagatggagataaatttatcgcaatggatggtatgggtaaatggtggttaacccatttaaaaggagaaacaggagagattttagaattactggaagtgaaaacagaattacctgtatctataactttgatggtagctttaccaaaaggaaatggttttgatgatgttgtccgttgttgtactgagttaggtgtatcttgtattgtaccagttttgagcgatcgcaccctcatcaaccccagtccccaaaaattagaacgttggcgacgcatagctgctgaagcggcggaacagtcagagcgtgcttttgtccctaccattttagaacctgtagcttttagcaccgctgtaaatgcaagtgcagcaaatcagcgttatatttgtgaagcgcggggaaattatccacatttaacaaaagtgctaaataatctctctggtgaaaatatagatgaaattgtcattgccacaggaccagaaggaggatggacagataaggaaattgaaatggctataaaagcaaaatttcagcctgtttccctgggttgtcgtattctccgcgctgtcactgccccaattgtagcattatccttgattacggctgcttgtgaggcataaaccgcaatactttgtgataattattcagaagtgaatgtaatttgtcgaatgtgggtataaatgatatatctcacgcaccaagatcaagataacgctgtttgcgtctttacttctagaacaccgattcattaatcgtcagggcgaagcattagggtgataacctatcgctaaaaccattgatattctgtccgaatgcttcgcccctacaaggtaaaaacagattacctagcattactgaatcgacgctctaggcgtgagaaattcatttaagtttatataaagtcatgctggaagaagtgatcgccgcctttgaacgtaaggactatcaaaccgccgttacattaattaaaccattactcaaacaatcaccggaagatccttgggtgcaattttatttcgcacggttacaggaagtttatggaaagcgagaagaagcagaaaaaatttatcgtcaacttttgaaagtgaccatcaataataaaatcatttcccaagcacgtcaaggtatacaaagaatcaaagattttgaacaaacagaaagacaaaaagccattgctcaagcaatagcagaaccaagtaataatgaaccaggaattttagttttagaaccgattaataatgaactaaaaaccttagctgcacccaaatttgcccaaattatgcaaattgatacttactcagctagactcatgttacctagtcgcagttggcgagtataccgcacaggaaaaataggcgaaatgcaattttatggcaaacaattacaacaagctgggattccctgtttttggttaaaaatatcccaaattcaacaaattcaagtatatcaagtgcaatatttttctgaatcatcacctaacccaaaagttgtatgtgtcagttcagaaaatcaacttggttctttgagttttgaatggtcagaagtaactgccaaagttgtaggacttttacctatttttgaacaggtagtagatattaatgttcgcggtaaattagaacgtaaaacccaaactcaagactattaccaattttgtgatttacacctaccagaaagacgtagtattttaagaatttatgacaatggctatgaatttcaaaaaggtttagaaatcactccccaaactacacaaaacacaattagaattaattggaatagtttgatgagttgggttgagcaaaaaatacctcaagttaaaacttcgtcagattttcaaccttttggagaaacagttttagatcaaacagaagtgctaaatcaaattccctctcatattcaattatttaggagggaaaatactaattgggatgcagcttttcagttatacagtggaattgtatttgtgaaaaactgttcaagtaattgataaatcagtaagttggagattttggattaaaggtaggatttgtctttgtgtttgtagtaagggctttagccctgattttgaggactaaagtcctcactacgagcaatatattctatattaaacaagttaattaatccaaaatccaaaatccaaaatccaaaattgatttatccaggtactttcacttgacctgccatatctagaaaactactcatgttcgcacctggacgacgacgatcaccagaagatggagtaattaaatatttagttgcaaaatttgtttcagttgctactgccggttttgcgggttctgcttttgctgcttgagcgggttctgctttgggggttggtgcttgagcgggttctgcttttactactgctgctggtgctacgggtgctgctgctggtgtagtttctccaacttcttcttttagttccaagtagtattcatcttttttgccaaataacccaccgatgaagccaagaataccaccgattaaatttttgataaatccaaacatgacaatttctcctgtttttaaatttttgtcatatcaccataattgtaaattatttcaacataattttacattttgttgccataatcattgcggtaataagcagtaataactttagggatttttactaaatcgccttgtagtcattctataggccaattgttatgacttcattacaactattagcgactgatgaagaccagcgaaatcattattaaatcttaccgtatctataagcaagattctgagatgttccttaacaaaatttaacaacattggttaattgcaaaaactgtcatagcgtctgggttgatagctctaatacttggttatattttctacagaaataactcaaatcagatttgatgaatactgacaattttttacaaccctatttcaaaagtattactatgaatgataaagcaaacaagcgtaatcctgttttattggtacacggaattaatgatactggagcggttttcaacaaaatggcgtgttacctgggaaagcaaggtatggtagtttgtacacttgatttaattcctaataacggttctgagcttttagataatttagcacagcaagtagcagattatgtaaacatgaactttgcaccagaacaaccattagatatagtgggttttagtatggggggaatagtcagccgttattatattcaaagattgggaggaatagaaaaggtaaataggtttattaccatttcctcaccccatcggggaacaaatattgcatatttaacttggttaaagggtgctttacaaatgcaacctaatagtgattttttaaatgacttaaattctgatgtagaaatgttgaataagttaaattttacatctatttggacaccttatgatttgatgattgtacctgcggaaagttcaagaataccttttggtaaggaagtgattttacccgttgctctgcatccttggatgttaacagataaaaggacttttgaagtagtagcatcagcattagatgaaccaattagtcattagttattagttattagtcattagtcacgggagcataccaatgcaagaaaaaataaccgcagcaacaccaaaacatctcttaaactctcttacctttgtgtcctttgcgtcctttgtggttcaatcatatcagtcccttggatcattttttccgttagatcaaaataaatgtacacatttgcgatgcttccttagtcactggttatttttcccaatcaccaatcaccaatcaccaattacctatcaccaatttctgtatattcagaactaccaaaaattgcttctggataacgatagtatttaaattccattaagttataaaaaggatcttctaaaaagaaagtgtgatgttctagaggagacccaagaaaacggtttttgggttcttctcgaaaattcagttgtttaattttggctttttctagtaattgttgccagtctttttcttgggtgaaaattaaaccgaaatgtcggggataaatgcctttttggggtgttaaaggttctttagtgatgtgggcaactaattgatgtccgtaaaggttgagaattaaagcgtgggggttttctcttccggggatgcagcctaaaccgtcgacataaaaggctttggtttgggggatgttggtgacagggaaggcgaggtgaaatatgattttgttcatggtgggagttgagtgcgaaattatttgaccacatttgaccacttgacagattgattaaccgaactaaaaggatcattaatttgtcagagcggaaaaataatctagcaaagggcagatataattacagtaaaataaaaaacatggacgtaactggattcgaaccagtgaccccatcgatgtcaacgatgtactctaaccaactgagctatacgtccttaaccaaagcgatttttatcatagcatatatattttaaaggtcaagagaaaaatgccaataatggcactaattatgtttttattttttagccctcgaaccttccaccacttccaacaaactccgcaacatccaataagcagaagttcctcccggatcttgatgtccgatactgcgatcgcctaaataacttgctctgcctttctttgctaacatcggtatagtatcctttaacccttgttccgccgcagttacagccatccgcaaagcttccacactacccttaccttcatttacagctttttcaaaagaagtcacggcgggatgtagcacatctaccatagtcttatctcctaattgcgccttacctcgttcaataactccatttaaaccagattggagtaaatttaacatatctttttcagttaattcttgcttacccgcagttacagcactcgctcttaaaaaccatgttccatataaaggaccacttgcaccccccacactagatattaaagtcatgctgacagttttcaaaatactgctgatgtccttcccttcaatactcggtaagatactgctgatctttttaaaacctctatccatattgataccatgatcggcatcaccaatggctgcatctaattccgtcaattcttctttatgtttctcaataacagaagcaaatacatataaccattgaaaaatttgcacctgagtaaccatttcaaactccccagcgtaaacttgcggttttaactggtgcatcccatagctgtaacatttcctcgtctaacttcagcagcgtgatggaacaaccttgcatttctaatgatgtcatgtagggtccaattagattacgcactatttccagtccttccatctgacaaagttctgctagtttgcggtagacgagataaagttcagaaatcggagtcccacccatactattaacaaaagctaagaggcgatcgcctttttgcaacggtttatttaatagttccacatcctgccattcttccttggtttcgtcccattcccgcaccgtgcgacaataggcagtatcatcaaagagcgatcgccataaaatctccgtaatttcatcccctgacatcatagaaacccgttctcttcctggttctccatgaatgccaatacctaattctatctcatcatcccccaaagcaaaagtcggtgtacccttagcaggaacagtacaagaactcaacgctacccccacactacgaccatgcagatttacctttttacacaaatcagctatctgctgtaaatcatagctgttttctgccgccgcaccacaaattttttctgccagtactgttgttcccacaccccttcttccttgggtatataaactatccttcactgccacatcatcatcaataataatatttaatgtacggataccctcacttctggctaactccgtagccatttcaaaattcattacatcgccactgtaatttttcacaatataaataatacccgcacccccatcaacctgctgtgcggcggctaacatttgatcaggagtgggagacgtgaaaacctctccaggacaagcagcatcaagcattcccatccccacaaaacccgcgtgcattggttcatgtccactaccaccaccggaaataattgctaccttaccctgtacaggtgcatctgctcgataaacaaaagttggctcaaaatttacctttattaaatcagtatgagcagcagccatacctgctaaactttccctaacaaatgcttctggttgattaatcagctttttcataatttctgttggcaaaggtgctaagattcaggataaacttttacagcgccaaatttcagcatttttgctcatgaaagggaacagggaacagggaacagttagtcaactaattaacgataaaatttcgacatcaaaagattttcaaatctgtcacctgtcacctgtattgaatttcaagaaactatcaaaagcgtaccaagctaaaacataccaagggattacttctaattgcaaacccttaatgattaactgtcttactgctaaagtaccaagtcccaagggaaacagaaaacgcaaatctacagaaccatttgtagcacgttcaactcgttggtttaaatcaatcactgcatgagatattcccgatgctgcttcagtttgaccttgggtaatatctgtaaaaattatgcctatatctttcagtgtttccaaaatttctgataaagtaccagtttgatgatcatgatgaatcaaaatactaccatgatgaatattagttctcacctgactaatgtgaggttgtgctgttaaaaaattggcgatatgttgcattttctcaactttacggtttttcggtgcaactcttaacctgagtcttcctggagtatcactgacaatttttgtagcaatgggattaaaggatttatttaaatttgctttatctgtaatttttaacatatagcgtccaacttgatttataaatttttatcagagtcagggaatagggaacaggtagatgaggaggaaaattttagattttagattttagattttagattttagattttagattttagattttagattttagattagagtttatcaatacaattcaaaatccaaaatccaaaatccaaaagaacaacttctgacttctgacttctgactcctgactcctgtacgggcgaaggattcgggcgaacaattattaatttttatcacaggttattttccgaatgcttcgcccctacgactcctgactcctgaattcttacttcataattcaattacgaattacgaattattaggaattatgttgattttccgaagcagtttcaaatgctagtgtgtgttgttcttctgctatttctgctctagcttcagcgactatatcttcccaagtttcacccaattcagcaaaaactcccttgcttttttggtaagcaacaagaccacctttaactattgatttaactatgggtttacccactccagcaacaacaggaatgaccacaggtgcaagtaaaacagcaccaattccgacgataattccaggagcgccagcatcttctacaaaatcagtaattttcgccatattaaatcaacctcctataaattagagaatcttcaataagccttttaatttactctaattttagtcattatttcctcttactactggtagaggttttttataattcaaactcaaccttatgtagtagggcttgtatttggcgttgatttcggggcataatttatcacaatcttggtaaaaatcagaaaaatgacacgctttatccatgaccaattttcccaactatatctagataggatttacgcaagatgtgactgaaaaccttattcttgcctaggggtaattcatgaattacccctactttctttcccttttgcgtaagtcctgtagatttagaaaatagttgttgataatttgttgataatttgttgataaaattaaggtaaattatatccccgatttttcacaaagataaatcatttattgattgtttataagtattccacaatagcacttgttgataccgagatccacgacttctgcaatcaattcacaatttatggacaagctcataaaagaagtcggggttctgatcactctattcctgaatgcttacgattttttcaaagagaatatcggggatttttattaaattcatggaaaattatcaactcttctctgctttaactatcctctgttgatattcagtttcagtcattaattcttcagtagattcaaccctgtctaaaaataccataccttctaaatgatcatactcatgttgaaaaatccgcgctacaaaatcagttaattcgtgttgttgtaaatttccatctctatcagtatattcaatttcaattgtttgatatctgggaactaaacccctaattccgggaacacttaaacaaccttcccaacctttaacaacttccgttgaatgactaataatttgcggattaatcattgctgttggttgcatttctggtgcatctggatatctggcatttggacgggaagcaacaattaataaacgtaatgattcagctacctgtggtgcagcaattcccacaccattagcttgaacaactgtagctattaaatcatcaattaatttttgaattttctcatcttgaatattctccacccaagctgctttttcacgtaatttaggattacctaattgaataattgatgatttatcggtcattttgccaactcctgtaaaataggactaaaaacttgattcttgtgtaggggtaattcatgaattacccctactcttattactgtcaactattacctatcacctctaatgggtaaaggtgcaggtctaactattaattgaacagttgttccattgcgttctacttgtattggtagaggactaccaacttgactattttctactattttttgcacttcttccactttagttacaggttgattattaatactttgtatcacatcccctgctctgagtccaccaatggctgctggtgattctggaacaattctcactaataaaactccttgttctgcaactaaaactctatccccaaatctagtatttattctttccttaacttctggtgtcagcgccaccatttgtacacccaaataaggatgatctaccctacctttgctaattaattcttgagaaattttttgcacggtattaataggaattgcaaatcctaaaccttgagcgccttgaataatcgctgtattcattcctatgacttcaccacgagcattcagtagtggaccaccagagttaccaggattaattgctgcatctgtttgtaaataatctactcgtttatcactagcaccaatatcactactagaacgatctgtagcactcaaaattcctgaagtaactgtattatttaaacctaaaggattaccaatagcaattaccgcttcacctggttgtaatatattagaattacctaaagctatagctggtaaattattagcatcaatttgaatgactgccacatctgtaactgggtcttctcctaatactttaccctcaaaagttcgcccatctttgagtgttaccgtaacttcatctgctccatctacgacatgagaattagttaaaatttgtccagaggaattaataataaatccagaaccactacccctttctactctttcccttggctggggtattctatcaccaaaaaatctgcggaaaaatggatcggaaaattctgctggtatttgagatgtgactgttttagcggaatcaatgcgaactaccgcaccacctactttttgtactactttgacaacaaaattagggtcgccagaagatgcgataattgcaggaggcataattcctgcatttgtgtttgtagttttgtctaattgatttgtgccttgttgtgcttctaaagttctactatttaagttagagcagccactaagaactactgcggctaacccagttattaacatccaaactctggtttttgctttcctgtggtggatcaaatcactggtatcaatatgtttggattctagatgatgatgattcgtattcatgatgttattttttctccgtgttagtcgctaggtggtaggatattagctacctggttttaaccagaatggttacagtttcaagttacataaagttacataattttttgctcatatctccttctattgtggcaattagcagcaaaggtagtagatgatggaatttaccctagacaatctgtggcatcaggtgttagagcgtttacagttagagttatctcgtcctacctttgaaacttggattaaaacagctagtgcagtacagctagaaaataattgcttagttatatctacgcctaatttatttgcgagaaactggttgcaaaagtattacatcaatactattgcgcgtgtggtgcaggatattttaggttatcctgtagtaatttacattactgctgttcaaggtgatgaagtttctgggttaaatcaacaagatgttaattgggaagttccagcagctaatactattcaatcaaatgttcccaaaaatcaacaaaaaagtacagagttaaattctaagtacgttttttctagatttgtggttggcgctaataatagaatggctcatgctgcttctttagcagtggcagaatatcccggtagggaatttaatcctttatttttatgcggtggtgtgggtttgggaaaaacccatttaatgcaagctattggtaattatcgttgggaaatttatcctgattctaaaatattttatgtttcaaccgagcagtttactaatgatttaattacggcaattcgtaatgatagtatgcagagttttcgggaacattaccgggctgctgatattttattagttgatgatattcaattcttggaaggtaaggaatatactcaagaggaattttttcatacttttaatactttacatgaggcaggaaagcaaattgtcattgcttctgatcgtcctccttatcaaattctgagtttacaagagcgtctttgttcgcggttttctatgggtttaattgctgatattcaaccgccggatttagaaacccgcatggcaattttacagaaaaaagctgaatatgaaaatattcgtttacctatagatgtagttgaatatattgcttataattatacttctaatattagagaattggaaggggcgttaattcgggctttggcttatatttctatttggggtttacctatgactgtggaaagtattacccctgttttaagcacttctagccaaaaaacggaagcaacaccagaagttattttaaatgtggtggctgagttttttaatctttctagtgaagatttaaaaggtagttctcgccgtcgggaaattagctgggctagacaaattggaatgtatttaatgcgtcaatatacaggattaagtttaccaagaattggggaggaatttggagggaaagaccatacaacggtgatgtatagttgtgaaaaaattacccaacttcaggagacggataaaagtttaatgcaaaccttacgacagttgagcgatcgcattaatatgaatactcgttatcaaaagtagtaagtaactcaacctgaaaaaacgtaatacccagatacccgacttgtttaataagtcgggtatctattcactgtcacctgtcacctaatattaagcattaagcaaagtataaaaaattgttaaatttaactgcgattgtggaaaaaatattaccttttggggaaaaagttgtggaaaacttaataattttgtaagaaaaatacattaagtataattactttgtggaaaactaagcgagtttttccacagcttttccacaaatgtagaaattagctatcagtaatcagctttttagcagtcatatcttctatgtcaaaaatttgttaccattgtttttcgcttgttaagtccatattgatagcggttgtcagtgtgatgagaacaaacatatctcctcaaactcaaccctattccccattccctattccctattccctgctctatgaaattagtttgctctcaaagtgacctcagtaccaacctttcccttgtcagtcgtgcagtaccatcaagaccgactcaccccatccttgctaacgtgcttttacaagcggatgcggaaactaaccaagtcagtttaacagcgtttgatttgagtctgggtatccgtaccagttttagtgcagaagtaattgaaggtggggcgatcgctcttcctgctaaactacttttagatatcacctctcgtttaccagaaggggaaatttccctagatgacgagtcagcagacaacaccggagaaggtatagtagtcaccctcaaaccccaaagcggtaaatatcaagtccgcgctatgggtgcagaagaatttcccgaattacctgtaattgaaagttcggaatcaattcaactcaccaccgctgcattaattgaaggtttaaaaggttctctttttgctaccagtaccgacgaaaccaagcaagtgctgacagggctacatttaaccgttaaacaagacaccctagaatttgcagctacagatggacaccgtttagcagtgttggaaaccgctaacgagcgtcccttagaaggtagcgaacagttagaagtcacagtaccagcaagagcattaagagaattacaacggatgcttgcccatagttcttctgaagaagctgtatccttatatttagatcaaggtcaaatagtctttgcttggcaaaatcaacgtttaactagccgcactttagaaggacaatatcccgcctatcggcaattaattccccggcaatttgaacgccaagtagtattagaacgcaaacaatttatcagcactttagaaagaattgcggtattagctgaccaaaaaaataatattgtcaaaatcagcattgataacgaaaatcaagaaattacattatcttgtgaagcgcaagacgtaggcagtggtacagagtcaatgccagcacaaatttctggggaagatatagacattgcttttaatgtcaaatatctcatggaaggtttgaaagaattaccttctacagaaattcaaatgcacttaaatcaaagtttaaccccagttatttttactcctttaggtgggttaaaaatgacttatttagctatgcctgtacaattgagaaattaataggggactggggactgg

SEQ ID NO: 60 - DNA, 33818 bp, Sphaerospermopsis sp. LEGE 00249
  LEGE00249_75
tacaagacaggctctaccccaaccgggtccacctccccagccaccccagtgaccaccagatagaagttcctgctcattgctggatatatcctgaactaaatcggatttgatgttttgatttgacatgattgttagcctcaattaattgactcaattggtttataaatttgatgaacctagtttttttataaaattagtattcataaatgtaattattctgtggttataagttaatagttattatttctgtcttttgacttatcctaaattcatataggactccgatagcggtcaaatttgatttatatattcttgacaggatgcatacatcatgtttaagaatgattgcacattatcatactcccaacttctcgacaaagttgggaattttgttgattgctattgattgaaaatttctatctggaattaacctgattaatcccagttctgatagccatcagaataattgaaactagggtagttatcagggcaaggagagggtgtatatcgtttgtaatctttgtattccccgcaacagtttttgggtttataacaaggagaatagtggcatcttcccccagaaagaaactgctgttgttctgcggataattccactaattccaatttattgatttgatttgacatgattaattgcctcacttacattacttacatttttcgggttgtcagttttaggtaacaccctgcatttaaaaaatttgatatttgtggaattacaaaactcaggagtttaattttgtagctaagatttgcatattaagtaagggagaagaaaaagagattgttgaaactttctcaattaagatatgatgtttctcctccctggaatacagaaaaagtctcagttacaaaactatccgtctgtagaaggtactaatttatgaaccgtacccttggccgtaataaggacgacagatgtaggtggggtaacgctgtgggtaatagttgcgaccatagtcgtcaccacgaccatagcgatcatcatccattccacgaccgtattgacggtattgttgttgctgtcctccagaaagcagttcttgttcttctatgtttaattcaacgagcaaatttgatttcttggtttgagcagacataattatttacctcacttacttgtataggtatgtaacaacctatctttttattattaataattttttccagttttaaattattctttggttataatttcagaataaatatttatttcttttagctcatgtttttcacggtgaagtaaataatcatcatgcttttttagggttgattgaaatttaaacaaacaaatgaataaaataaattagtctccatgagaaaggtgaaaattcatttcttataatttaggaaaaaaattcttgagaatatcaggtagtaaactactccatctattaccaacagagcgaatgtttgttagtccaaagttaaaagatacacctatggtaatttgtgacaacctatatttactgttttgtgaactagattcattttctcctagatttaactcattatcggcgctactgtcaatgttagtagtttgtaagaaaaaatcagttttaccgatcacatcaaaatttttaccagaaattaaactctcttgttctgtctcagataaatcaacgagtaaatcatgataatctggtttaaaattttccatcataatcttataatgagcggatgaagaagatttttagattttgagaaattgtaaatgttctcctggctgagaaataaaattttcaagactaccttggatttgcacttgacctttatccattaacacgatccaatctgctcgatttaccacactaggacgatgggtaatcaaaattgtagtttttcctttgcgagattccaacaatcgatctaggacatgactttcactaactggatctaatcctgcggtagcttcatctaaaattaaaatcggtgggtttgtgagtattccccgtgcgatcgctaatcgttgtctttgtccaccagaaagatttgcaccaaattctcctaacacagtttgatatttattaggtaattgactaataaaaccatctgcatcagcaatttcacaagcttgaacaatttgatcaaaaggaatagcaggtgttcctaaacgaaagttttctaaaattgaacgactccaaaaatgaggttcttggggtacataaactacttgctgtcgcaaacaatcaagggaaagatcatgaatattaaaaacaccgatgcggatattacctgaagttggctcatataaacctgcaattagttttgctaaggtacttttaccacaacctgattgaccaattaaagcaatcacctttccaccgggaagttttagagaaaaattctctaataaatcaactcttcctgcatggtgaaatgtcagatgggaaaaatgaatatctgcatcaccagagatttggacaattggtttttgactaccgccaacaacttctggtgtggcatcaataacttctaataaacgagaaattgcagtttgagaacggaaatattcatctactaatcccacaaaagaaccaattaaagctaaaacattcacttgtaaggcattaaaagccagcatttgaccaatagttaattggttgttaattactaacatactacctatacccagtaaaatcacaccaccaagagtagaaagtagtctagccacagtaccgttaataattccgatttgaattgtgctgaaagtaagattagctagacgaccaaaacggctttgaaattcctcccaaaattgaggagcagcattagttgttttgatgacttgtgcgcctttaaaagtctctactaataccccttgattttctgcacctaaaactaataaactgcgggttttttgttgcaatatgggtaagaatggcagagttgctagagtcattaaagctccaaaaataatcactgctattgttaattgccagctataaaatagcattacacaaaaggaaataatggctatgaaaagctgactaggtaacagcactactacttgagaaattaactgattgatttcattaatgtcgctcaaacggctagtaatttcaccactacgacgagattcgtaataactcaaaggtaattgcagtattctcctgccaaaatccaagactaatcctaattgtaatcgttgaccaaaatgggcaatcatagtagattgtatgacttgcaaactactactaaatacggtcatgacaacaacagcagatactactactgtgagtaactggatatctcccctgactaaaacatcatcagtgagtaattgaattaaaataggagttcccagggctaatatacccaggataatattaataattaaaacttgtgtcagcaatccccgataggggataattcgcataaaaaagcgtaaaaaaccaccgtggggtttttcttggggttgttgagaaaaacgctctggatctggctctaataagagcatgactccattccaagctgctaataattcttcgcgtttaatatagcgaatacctacagacggatcagcaattacatattttttaccctttttgccatataaaataacccagtgataaccacgccaatgaataattgctggtagttggatttcgttgattctatctacaatttctggtgaggctttaacggctctagcattaaatcctagatgatcagatccacgttttaaacctaataaagtagttcctagttgtcctgttcctacggcttctcgacttttatttaaggttaagaaacgtccgtaatatttgcaaatggaagctagacaagctgctccacaatcttcttcgcttgcttgtaaaatacattggtattttctttgaggttgaaataaattaaacataatagagtagttcagtagttcaggagtttagtagttcaggagtatggggaggtagtgggaaattatttgtattttcccaatcacaaattaccaattacccattacctattacctattacaaatcagtaattaatctggcttttctgagaataaattgcattacactttcctcacgggtaataatatcagtgcgaccttgcatccccggttgtaaataacatttatgttcacctctacctacatataatgtttctggttcaatagtgacttcataaccattaactagggaatttgtagatgtataattttgaggttggtttgttggtgaaactggtaaaatatctggagcaacgtttttgacaatgcctttgagagtaccataatctggataaggacaagcagaaacttgcatttggattttttgacctggttctactttgctaatttcttgagccggtacataggttttgatttgtaaaggagcattgagaggggcaatttgagcaacagcttcactgggttgtactacctgtccagggttacgaatttttaattgtaataatgtgccagtaataggtgcgcgaattacactttttttcaaatcaatttctgtttgtagcaagtcttgacgagagcgaataagttgtttttgaatttccaagcgttgttgtaatagagtctgaagttcttttttcaaagctgctaaatttgcttctcccctagcttgttcttgtttaattctttctgcggcgataatgacagcagaattactaggattgatagctgttcttgctttatatagatttgtttgagcaactttaaatgcctgtactttttcctccaaaagagttttagcgtcgtttttagcttgttctaatttagctctggcagatttaacagcttgttgtttttcttccaaaatattgcgagaaattgcaccagaatcagcgatcgcttgcaatctatctctctgcaacttggcaagatggaaagctgtttgtgcttcttcgattgtggtttttaaaactccttcttgttgtaagcgttccagctgtgatttggcaaatctcactgccaattctgcttgtgccatttctgcattagctttaatttgttggtcttcaaagttacgttgagtaccatctaattcagcttctgatgcgataattgtacgattgattaaatttgtctgtgccaaaatttgattattgatttcacctatttgagcatcaatttgtacaagttgtaattgaccttgttgcagactactttctagttgttttttttgggtttgtaaactggaatcatcaacataggcgatcgcatctccctgattaactacctgattatctttgactaaaatcttctgcacctgtccagaaatagccgattcaactaacctgagttcccccacaggtctaatagttcctggaactttcaccgtcactttataagcaagtacagtagttaaacctacacctaccacaaagatagtcaacattacccccacaccaatgctagtccatttgtgaatttggggcagaaactcattaatttcaactggttgcagatgttcagaacctggattaccagacccattccaaacatagttttcatggcggtgtaaagaatccacaacgttgcacctttttgattgaaacatcaacaaaaatcagggttatctcatattacatttgatatctcagccgctcagataactccacataacttgattggaaaacccgtgtaaacattcaactatcagctatcattaatcagcttttttagacttatgccagaaatacttatttgataattaaccaatttctcaaacatttaggacttacgcaagatgtgactgaaagccttattcttgcgtaggggtaattcatgaattacccctactttcgttcccttttgcgtaagtcctgacattcggattcctgactcctgaattgtgatcaaaaaatgtatctttacctctatcttttggtgaatatttggtgaatataagttatacccaaagtatcaacactgccaaatactggctcatcataaaggttgactcaactcaacagaaccagaatgaaaataatcaaatatgtcgctcacaatagtaaacatcatggtgaagaatcctctataatcattagtgggggataagaaaagaaaaagctgaccatagcaaaaacttttcttgacatctctgacgtgggcaacgctgagaaaacaaccgaggagaacgctcaaactccctcaaagacctcacttacgttgagcgagtagtaagaatctcctctccccccttcctactgaaaaacacaaaattcccaaaacatgattgtaaattgcgctttaaattgctttaaattactgatttagccaataaaaatgaattttatagagaattttattgtgtagctttgccctgagaaaaattgttattgctaatctgaggttgactaccaccagttaaaaattcttgttcctgatcagataagataactcaataaaccatttgaatgtcatcattagacctctccagaaaagaaattatggaacctatttatgggggcaggtcgaagcatttatgatatctagatgtctgatttttccgttaaattatcgcccataagcttagcccctacaacttatgacaaattaatacattctattttggagatgtctattggacatgacatgattgttagcctcgcttaactcaaattctcaagtcacccaaaccacctaatcttctcaaatctccgaaactggttctcggtagtgcaggcaaaccagtgagaacaggtgcagaacccaaggctggaacatcaggtatagatggcgcacccaatcccaataaatcttgtgctacggtgttgacttctgagcttcgacctgatgaatttgcaaaactcccgtttggaccagaagatacatacccttgtaacactaccagtctgttagcaaaattactaccagataactcaaagtctgcaccaccagagatcatctcctgttgccactcagataactctgccaacaaattggatctgatggtaaaatatgacatgattgttagcctaagttacgtaaataaatatccaaatccaaaataaaacaattcaaattcctatgcagatttttgagtagggggattaaaaataatcaagaatttggttctttgatcacccccaagccaatacttttcggttaagcccaaaaaatagaattatgtaggttggggagccatcgccttggacgggtttcccggcttgtggcgaatggcgtttgaccttaggaaacccaacatttacaggctgttgttggattgcgactgcctacaccaacctacaaaaactcttaaccgaagagtattgacagctgttcagcagatcacagaaaccgccttagccaccaaaaccaccaagaccttcaggaccaccaaaaccgggaatagtcgccccttgtccgttgagaatgggtgctgcgcccaacgctgcaacttgaggaactatgggcgcacccaatcccaagaagtcttgggctgcggtgttgacagcagaacttgtaccaatggagctaccagtgctaccattaggacccgaagctgtaataccttgcaagtttgctaatctattagcgaagttactgccagctaactcaaagtcagccccaccagtaactaactcttgtacttcatcagataaaacaacaaacaattcagacgagataatttgatgggacatgatttttagcctgacttacgtaatttttcaacaaaggattccagagcataaactaatttcttactgtttacttttgggcaaaaagaaagcaaacataatcgctgctagaacaccgattcattaatcgtcagggcgaagcattcgggtaataacctatcgctaaaaccattagacctgtccgaatgcttcgcccctacaaggtaaaataggcgaagcgatatagtgttgtgaaagctgatttttttgaccatctatgggagtaagtggttaaaagggtggggagatttagccaaaaggaccgccaccagtaccgccaataccgggtgtaggtgcggcttgtccattgataacgggtgctgcacccaacgctgcaacttgaggaactatgggcgcacctaatcctaaaaagtcttgggctgcggtgttcacagcagaacttgtaccgatggagtcacctgtgctaccattaggaccagaagctgtagtaccttgcaggtttgctaatctattagcgaagttactgccagctaattcaaagtcagcccctccagtgataaattcttgtgcttcatcagataaaacaacaaataaattgggagcatttatttgatttgacatgattgttagcctcacttacgaaattagatgaatcatcacctaacaacccaactataagcattcttgctcggtaattcataaatccagggatagaaatcagatttggtagttttacttctccaagtagatataaaatctttgaattattacaaatatattcataccctatctagattattatggtttttgcgggtatctttcatgactttacaaacatccttttagggctggagtgattttacaggcaacttagtaccgcatcttttacaatattctgcatctgcatcatgaaaacctaaaccgcaactagaacaaacattttctacctgattggcggttttcaccaaccctttaattaaatcacctacctgccagggaatcaaagcaactcctgttaaaatcatcaatactgtgagcaaacgtcctaattcagaaatgggtgttaaatcgccaaatcctaccgttgtcattgtcaccactgaaaaataaaaggcatctaaaaaagtgccaaagttttgcgggttaactggatgctcaacttgataaattaagcctgaatatacaaagatgatagcaaataaagtaaataatattcgtgtaaaaattacaccatcttcgctgctaatagtaccaaataagaatttactatctataaacctcagtaagcgcaaaatgcggaaccatcgccataagcggataaatctaatatctacaaatcccagtaaagatggtaaaatagccattaaatcaataattgaataaaaactaaaaatatatttaagtttattttctgaactccataaacgtagtgcatactctatggtaaagattattaatatgcaagtatctaatgctcttatttctaaacgagcatcacgagaaatattataagtttccgctacgaaaattcccgatgataataaaactaaagacgcaattgttaaattaattgctttcccaattggtgtttctaagtctgttaagtaaaattctattttagctcgatttattatcataatatcatcaaaaaaaataactaatttataagaaaaacgccaaaaatgcgctattataaagaataatcctatttaaatttcctgtaaagatgaaccaagaatctcaagaatattttatgagtttggccatagaagaagcaaaaaaaggagatgcgccctatggtgcggtgatagttaaagataatcaagtagttgcagtagcttataatactgtcagtagagacagtgatccatcagcccatgcagaaattaatgttattcgtaatttaaccactaaactgaaaaatccagctttagatggttattctatatataccacaggtgaaccttgtcccatgtgtgctagtgcttgtgtatggacggggatatcagaaattatttatggtgcttcaattgcagatttaattgctataaatcaaggacaaattaatatatcttgtgaagaagttatcactaaatcttttagaaatatcaaggtaacaaaaggaattttaaggcaggaatgtctagaattatttgcataaaaaaagccctagtaccgcttcgcggaagtcaaaagtcaaaaataataggtcgtaagctttttagcgattgagaatggttggtttatttatgccatgctgtactaggtagggcttgctgaataaactcaaaaccttgataaatcaagggtttcaggtgaaaaatcaggaaatcagtgcaggatttttcaggggtatactcctaaaagcgtgcattttccgggtgaaatttcaaagaattggttactaacagatcacccaaactcttgcctattccctattccctattccctgccttaacgaagagactttttcagcaaaccctaggtaatttgattttaccttgtaggggcgaagcattcgggtgataacctattgctgaaaccagttcatattctgtccgaatgctatacgcccttacgattaatgaatcggtgttctaggtgacaggtgacagtttcaagagttggatagaaacgattttttctttaactaggaattaagtgcagggtttttcacttgccacctcataaaagcttgcactttttgaaagcacttcggcttacttcgactgcgctcagtacaagtcgctcagtacaagtcaaaatagctaaaaccctttacctgtaaagttttcagatttatatggctaacgccacgctacgctatcagcaaaccctacatagaggaagcaccagtagcaatgaggcgtttgaataatgcttctgaccaaccagtttctctaagtaccgcagaagaagaaacttctacataagcttgctcaataaaggctaaatcaatcatacaaattcgacccaatgcgtcttttaattcttctgatttgctatcagattttaattgtttaccaacttcatgaacaaccactgccatagccggaactacgtgttgaggtccgataccaattttgacatgaacaagtccaatatgccaacgaatattagcatatttttccccccaattatccacacctgtaaacatttcagaaaaccattgaataaatgtttcatggaggcggtgcattctgccttcttttgcttttaaaatggcatccatttcttcatcacgtcctaaataagcatagaagtgatcagccattgttgaagcaattcttttaccccaatcggcgttggatgtcagaattgatttatcttcagcagtgaaaccaattcttttttccatcttagccaaaaaagatgcgggttcaatagtcataattctcattccttaaaaaagatagatgtgagtaaattagttagtatttatcagttatcagttatcaattggcacaacgtcatatagaattggcaccactatttgataatctaatgatttatcaaacattttgaaatgatacggagcatttggtagctccttttctaaatctttaccctgaatgattaacaccgaaatttccttttaaattatgttgttttactgcggagaaaactaactagatttttcaggaatgattggctaacagttgatttttctgacttttctgtggacttttctgtggttttacttgcagatacagtttcctgcactggttctggaaaagtgattgtgggcgcggaagcagaaagaggttcttctatagtgaatgtgggtgtagcagctaccataaaatactcttctgctaaaccaactacaatcagtcgaaaagcaatttgttgtacggttgctatgggtagattgagttgattagcaatatgctgtaaagaaacttgtccattaacaaattcccagacttgccattcttgagcatttagctgtagtttgggttgtttgaccatcaaaccagacaaacctgaagttggatctggaagtttttcttctaaagcactccaatctcgcaatgctctgagtccaaccaatattacttcggttgctgacatactcaaaccagtcatttcccctaaaggtaatgttggtgttggctcaaatctaaagatagcatccttgacttgaaataaggcacatactggacgcaaaacttggctattaaatagcagtttaagttgttctggttgtagtagtccttgagatttaagacacaagcctagtggtgagttggcaaaagaagaggatatttgagtgactctagatattactctttcactgatccaccctctttgagcaatcatcaatgttaagccctgttgatctaaacgatcagatgcgctgactatacgaccttggtgtaaccagatataataaacttgctttctcttatgatcatggtcttcagctataaattcaatgtaaagtattccggtttttttaccttgatctaaaaactgaagcagttcaggtaaggaaaagtcagcaaagttaccagtaatagtcataaatttacctcccgtttggggtattaaaagattgaaatcatcagaataagataatttttttggcgaaaaatcacttcaaaagccttttttttggttgtttggaaactatatttctagaaaaccagaattgattgaaaagattaaactacatattaaactacatattaaactacagattaaactggacaactttccatcaaatgctgcactagggcaatgactgcttcagctacagagtctctttcgttagggttgactatgaccataggtggtctttggtcttctcccacatatcccagagccagatagacatcttcttgagaccaagctcccgaacaatcggtatgtgttaaaccgataatcataggaatttctgcccgttcttgcataaagttgagaattttccgcgcataacgaaattctctggctctatgtgccgctatgagtacgatataagcatgagctttgcgaaccaaaatatcccacatgaaatcaaagcgagactgaccaggtgtaccatacaggtgtaaagccatgtcaggtccaaattgcaggcgaccaaaatcaaaggcaactgttgttctttgttttagtaatgctgtttcatctgtggcacgagtatcagtatcaacaacttcaatttcactcactgaacggataaaagtagactttcctgcacctactgatcccgtgaccattaatcgcataatttccatgtttatttactccataaatatagcgtttcccgtctaatgaagtacacactaatttattcactgttgcctgttacctaaaatgaaaaaactttgtacttcacgcttattgggaatggctataaacaataagtgaataatttttcaacggtttgactaagctcctaaattttagtaataccttttcggtatgtggtggaaagttccctattcagacatggttttgtctgcaagggaacctttaattgagttacctttgatatgtgatatggaacatttagattaaaactagtttaatctccgccagaactcgtttaatttctagcattaatacaccttgtttagcactttcactggccaaaactaggaagactgcatcttcgccgcaaccagttaaaataccaaagccttttttaccttctacaaagatgcgatcaattgaacctctggctaactcaataccaattctttcacctaaagatagcatggatgctgacattgctgatacccgttcttcgtccatcgcacccggtaaacttgtggctaaaggtagaccatctggggtaacaagtgctgctccttgaacatctgttgtcgcagcgacaaagttttgcaaaattagtcctaatttttctgtgttaattgccataataatttgttctccaggtcttcaaatttggttgtgtgcaggaaatttattcctgattaaatcaatttttgatctgtaattttcaagtacagactttttattctaggggtgtgagttcaaagacatcataagtgccgcctctgagtacagattcagtatgtactccccggaaacgtttgccaagtatttgttctaatgctccccaaactgcgcccaatgtaaaggtacatttccgatctgaaccctgtgcttcccctgctgaacaaacggtttcagatgtgtacgctttaatggtatcaccatctgtaacaattttatcaattatgcacagtctggtcccttctttacctaatgcttgggataattttgcttgtgcttgttctagggattctactgatcctgagagacctaaactttcagctagttgtttgcctcgcgctcttcctgctgtaatgagggcaatggctgtggccttgtctcctaaagcgtcttccatgccggtaatgactgctttgaaacaaactatgctgctgaaatctcctagttgtggtcttagtaattctggcatatctggcatatatttacctcacttccattgagataataaatagttagtttttacacaaataataaacaattgatttgactgtggttatgtctccattttctttgatgtttggaaaactataaaagtgtaaattttgtgtaaatttatgcttttcctgttagttgatcctcaagtcttcctagttaattatgttggattcaatattaatatcacaccgtataaatactgaatttattctaatttattgttaacatattttaaatctatgtgaataaatactcatttatgaaatatcctctggaagactctatgtaaatagatgtcacaagaattatcttcccagaagatacccatttatatgtattaaatgtttgtgaaattctcaaaaaaaatcacttaatcataattttaattccaataatgattacaatgatgattagcaataattcttataatacttagttaggcaggcacaataataaacatcttgacatcaaaatcctcagagttttattcttgcagaaatgctaaaaatgtattagcaagaatagctgcctgagtgcgatcgcgcaaattaagtctgcttaaaatgttagtgacatgatttttgactgttccttcggaaatgaagagttgctgggcaatttctcggttactagcacctgtagcaattaatcgtaaaacctctttttctctaagtgttaattcggttaaactcggtggtatggatggtatggggttgggtgttgtagatagaaactgagttaaaagttttttgactattccaggacctagttgagaatatcctttatcaactgcacgaatagcaacagctaattcttctgagggtgtatctttgagtaaataacccattgcaccattttgtaatgcagctttgacatattgatcatcatcaaaagttgttaatactaaaactttggtagtgggaaattgtttttgaatttcttttgtggctgcaactccatccatgataggcattctaatatccattaaaactacattgggttgcaatttttctactaagttaatagcaatttcaccgttttcagcttctccaactatttctaaatcaggttctaattctaataatgcttttaaaccttgacgaattaaaccttggtcatctacaagtaaaactgtaatcatgatttttatgttaggagtcaggagtcaggagaagttaatcagtttttttcaatagttatgaattatcacttatcacttatcacttgatattttcaggtagttaaaggaattgtcactataatttgacaaccagcatcgtgagcagaattaattgtcaattctccacctaaagctaaagtgcgatcgcgcatactttgtaaaccaaaaccagtggtattttgggtaatatcaaaacctttaccatcatcttgaactattaattttatagtattgctggttgtagttaattctagttgtatagatgatgcttgtgcatattttgaaatatttgttaatgattcttgaataatgcgataaatgggaatactcatttcttggggaagtggatattctagagaaagtaaaaaagttggtaaaatgccattagcacgttgaaaatctgctactaaaatagtgatagctgcttctaaagattgtgattgtaaagggtgtgatcgcatagtagaaacagattgacgtacatcctgtaacgcttttgttcctagctccttagcggttgctaaaaatgtcatagctctaggaatatcagacttagaaagttttaaagcggtttctaattgtaagtttaaagcagtgagagaatgtcccaaagaatcatgtatttctctagcaatacggttgcgttcttctaaggtagcttgattttctattttcaaagcatattgacggagtttttcgttagcacgagctagtttatctcgactttcacgctcagataaaactgcattcattaacagtaaaacaaatatcaaagttaacccgaataacaccgctaaattaaaactaaagaaacggaatctatcttgtaatattggtgttaatctatgaggaggcaaccgacttttcattgtcatcaaaaacaagataaatgataaaaaagtgacggttaaacgccctggtaattgaaaaattaagcagctgcgagttactaaaatcaaatatagaaaaggaaaaagtctagccgttctcccacccaaaaaaccagtaattaaaattaaaaatacttcaatagccgtatagataattttgataacattattactggtaggtattcttaaacccatcgaaccaaaaaccgccaaactacaaatagttaactctggaaaacgtgcagcaaattttggtgatggtgagggcataattactactaatacagatagccctagtaatacccattctaaatatagtagaaaccgaaaaggatgattattaatttcgatagaacgagacataaacagtcaaaaggtaagaatttaggagtcaggagtcagtaggggcgaagcattcagaaaataacctgtgataaaaattaataattgttcgtccgaatgcttcgcccttacaggaaaacaaccttggacaaaaattgataatttatcacccgaataaagaactcctgactaattgattgtgctatatcttgccgagattggaaacatgactaaagtcatggctatagacgtgactttttactcatctggtaactggagatgatttcatatcatggtgacatccaaccaagaaaaatacaaggtaatttatgaatcgcaagacattatcatttttagctgctgcttttgctcttactttaacaacaacaccctttgtagcacaagcacaaccaacttttcctaagcgtcaaccaggtaaagaatttgctcaaaaaagtccttggcaaaaattaggacttacagatgaacaaaaagccaaaatgcaggaaattcgccgcaatgctcgtgcagaaatggagaaagttttgacagcggaacaaaaagaacaattaaaagctgcaatgcaagaacgtagaaatcagcgttcacaaggtgaaggtagaatggaaggtaaaggtagaggaaagaaaaataatccttttgcttccttgaatttaacggaagcacaaaaaaccagaatgcgggaaattaaagagtcttcacaacaacaaatggaagctgttttaactccagcacaacaagaacaactgaaacaaatgcaggaaaattggaaatctcgtcgtcaacgatgatagggtactggtgactagtgactggtgactgggtaattaattatatttttcccaattacccattaccaaaaactaaaaaaataacgttcttgccataacataattattccactcaccaagataaaactaattactaatttgcggaataattgatcactcattttttgtaagaccagatgacctagaaaattaccagggatagaagctaaaccaattattattccatatcctatctcatcagggtgcaaaactccaaatataccataagcaataattttgatgatatgaactacaactctatttagtgcttgagtacctagtagttcttctttttttaaaccataatttagataaagtggggcaagtacagaacccatgctaccgataattcctgataaaaaagcataaaggaaaccagcaggtaggaaataccaaacacgaactgtaaaagattttttctcttttttaatcaggaaagaaataccagagataattaaaaagaaggagacgataactgtcacccattctaatttgagttgtgtgaaggtgaaagcgcctaaacaaccaccgacaattgcacctggtaattcccatttaattacttgccaattaatattttctcgataggcaaaaatccgctcagaattgccgaatataccaccaattgtaattactggtggtatggcagttgctcctaaacataaactgacaacaggtattaagactaaggaactaccgccaccagccaccatacttacaaaccaagcaaatatgctggctaaagttagaattataaaagtcatgttgttttgtctctttgcactccgcacaccgcactctacgcaaaaccccacaaaaaaacttttttagtaaaccctatttaagaattagtgagagatttttgattttctaaatcttggacgttcaaagtttggggtatctgtattgctaatgctaccataatagttgtcatgtaagaaacaatagttgcccaaagtagatggttattttggaaataccaggcggcgatcgctaaaggagaaaaacccacaaaaaaagccagtaatacagcatttcttagacttgcaccagcttttaaaccgataaagtaaccttcgagaataaaggcgatcgctgtaattaccaaaaccggcaacaaccaaattgtatattgagcaatgttagtattaacttctgggtgattcgtcaacaacccaaaaacctgatctggaaaaattatagatataaaagcaaaggacaaagcgatcgccaaacctgccatcatagacacaataagcaatggtatcatcttttgtgtattgcccttacttttaaaattgccggttaaggtttgggttgtcacccccacaccttgaactgcaaactgactcaaaaaagcaatttgcagcagcaaaccattttctgttaaaacatctgttcctataactgcactaatattagtaaaaatcgaataagcagaaatcatcgctacatagcgaatgagaatattactcttcagggcaaaagtatcttttagtgctacccaatcaaaaatttcttgtagtgctttaggtaacacttcccactgaatactcaagccaactcccaccaaaccaacacccagcgccaaatactgacttaaagcagtagctaaacccgcacccatactttcccaaccccatttaacaatcattacatagtcaagcaacacattagaaccattaccaacgatagacatcagcaacaccaaaccattcatttcccgtcctaaaaaccaaccaaaaaggacaaaattgagcaaaacagcaggtgcgccccaaattcttccgtaaaaataatcaactccagaagcttcaatttcaggagaaccacttaagataaaaaaaccaaacttatgtataggatattgcatcagtagaatcactaaacccacagttaaagcaattaaaccactgcgtaaaccagccaataatacggcttttgggtcatccagtcctgctgcttgagcagtcaaagcattggtacttgagcgcataaattttaacactcgataaagatagtcaaaaagaatagttgccaaaattaccccagccaagtggcggatatctgccaaatgtcccaaaaacgcaatatccaccaaccccgcaaggggaaccatcagattagacaatacgctcacggttgacagccgataaaatcggggtaaaaaatcgtatttagttgagactgtatcaggcatagcatttttgatatcaaagggaactgctttagtttattcccataatcaaaaaacagatgtggaaaatacagcaaattcctgttaaaagtgaagaattattgctacttctcaatatttccccatgtctcaagaatttcctattggtagtaaagtccgtgtggtgatattaccaccatacattaaaactgctgaccccatgcccatgttacgtcctcctgatgtgattagcgtcggtgaagaaggtatagttattgaccgccgtcctggaggatattggggtgtacgttttgctagaggtactttcctcatggatagtcaatatattgaaagtacagaaaatccttctgcatctgaagcagattgaaaacagcaaccgaaaagaatgttaacttatgttaagttatgattccggtttgcaacaatgatttcacgacgtaattttattaccattttattggcgggttgtttatccctcatcagttggctgaactttgcccccactgctgctgctttgggtggtaaactacctgcaatcaaccaacctgctcctaatttcaccttacccaccaacacaggagatggtaaaatttccctttctgacttacgtggtcattgggtagttttatatttttatcccaaagatttcacctctggctgtacaattgaagcgcggcgttttcaacaagacttgcccaaatatctagaaaaaaatacccagattattggtgtcagtgcggatgatattgattcccacgccgaattttgtgattctgagggtttaaaattcccccttttggcggatactgatggcgctgttagtaaagcttatggttcttggattggctatgtatccatgcgtcatagttttattatcgatccccagggtattttgcgggaaacctttgtcaaagtcaatcccactattcacagtcaggaagttttagcacgactggagaagttacaatcagataatgggtaattcaattttggattttggattttggattttggattttggattttgttaactccaatctaaaatctaaaatctaaaatctaaaatctaaaattttcttcactgtcaccactcacctattaccaaaaaaatctctaaatcatttctactaaggtgttttttgcagatgaatcatgatccgtttattgtttctccaggggctaaaatttccttaaaagatgattatgaccccagttataaagctgaatatcatgaaaaagctgaggcgaaaagaaaattaaaagctggtatcaaagaattagcgaattatcaaaatattctctatgctcaaaatacttatgctgtgctgattatcttgcaagcgatggatgctgctggtaaagatagcactattaaacacgtgatgtccggggtgaatcctcaaggatgtcaggtttttagctttcaagcacctagtgatgaagaattagatcatgattatttgtggcgttcaattaaagctttacccgaacggggaagaattggtatattcaaccgttcttattatgaagaattgttggtggtgcgcgtccatccagaacttttagaaaaacaacaactgcattatattccgcatggtaatcaaatttggcagcagcgttttcaggaaattaataattttgaaaaatatttggtgaataatggaattgttgttctgaaattttttctcaatgtctcaaaagcagaacagaaaaaacgctttttagatagaattgaatcaccagaaaagcattggaaattttcccctagtgatgtgcgggaacgtggtttttgggatgattacatgatggcttatgaagacgtttttaaccacaccagtacagaatatgcaccctggtatattatacctgccgatcgcaagtggtttaccaggttagttgtgtcggatattatctgcactaaattaaaagaattaaatttacaatatcctactgttagtgaagagcataagcttatgcttttagaagctaagagaatattagaaattgaagatgaataaaaagcactgtatgagttttaacttcctatgtctttgggaagatatttattttgtctacttgacttttttcatgactattggttaaattttagcttatgattaacattcttgaatattccagtcctgtttttataagtccaggcaaattaagcgataagactatatagcgtttcccagtctcatgaggtacaccataatttatttactgttaccaattcccaattcccaattccctaagataaaaaactctgtacctcactaacttggtaaatgctagatcatttttatgatattttatcactaaatttatagttgcagttttatacatagaatttaaatatattagagatataaggtttttttataaataaaatgtgatttatattgagaggatgcgtgaaaagttattaagcatactcaacaaactatgtctatgtctattatcttcagacctgattatccatttttgaccctatgactttcctagaaatacctgccaactttgaaaatttacttacttatattagacaaaatcggggttttgattttactggctataaacgttcaactttggtacgtagagttactaagaggctacaaaccttaagtatagaaaattttagtgattatatagattatctagaagttcacccagaagaatttaattatttattcaataccattttgattaatgttactgacttttttcgggatgctgctgcttgggaatatttagaaaagcaaatcatacctaatattattaaaggcaaaaaaaatagtgaacagattcgcatttggtctgctggttgtgcatcgggagcagaagcttatactatagcaatactgtttactgaagcattaggagtcgaagagtttcgtcatcgagttaaaatttacgctacagatattgatgaagaatctctcaatcaggcacgtcagtctgtatattcagcgaaagatattgataaagtgccaacggaactactggataaatattttgatttagccgggaataattatatatttcgtcaagacttgcgtcggtgtgtaatttttggtcgtcataatttatttttagatgcgccgatttctcggttagatttgttggtgtgtcgcaacacattgatgtatttcaattctgaggtgcaggggcgaataatggcgaggtttcatttcgcactgaaggatactggctatttgtttttaggtaaagccgagatgctgctgatgtattctaatttgtttatgcctgtagacttaaaaaatagaatatttactaagttatcatcaacaaatttacgcgatcgcctattagttatggcaaattcagcagatgatgaatctaatcgtcgtttatctaaacacattcgcttgcaagagttggcttttgatgcaaccccagtagcggagatagtcattgatatcaatggtttattagtgattatcaatgagcaagctcgcagtttgtttggtttatcaacgagagatttagatcgtccttttcacgagttggaaatttcctatcgaccaatagaattgcgatcgctaatagaaagggcatacaaagaacatcgtcctatcaatcttacaaatgtagaacgctatttatcaaattcagaaaagcaatacttggatgtgcggatcacacctttacaagatgataatctcagcttactaggtgtgagcataagttttaatgatgtcacccgttatgtccaattgcaagaagcattgcaacgttctcgacaagatttagaaactaccaacgaggaactacaatctactaatgaagaattagaaactaccaacgaggaactacaatctactaatgaagaattagaaacaactaacgaagaactccagtctagtaatcaagaattggaaacaatgaatgaagaattgcaatctgcaaatgaagaattacaaacaattaattatgagttaagcgatcgcactttagaactgaaccgcaccaatgtttttattacatccattcttaaaagcctgcaaacaggaatggttgtcattgacccaaactttaacattttaatttggaataattttgtagaagatttatggggattacgcaatgatgaagtgattaataaatctctatttagtttagatattagtttacctgtggaagagttgcgatcgcctattcgtgatattctatctggtaaaatagatttccaagaaatgattttagccgctacaaatcgccgaggcaaacaaatccaatgttatgttgctctcaaccccctcatcgacaaaaaaatagaaggggtagttgtgatgatggcagatgtagataaaatcaaaaatatgattcataatcaataaattcaaaaaagttagaaaagcttgatcagtcaatggctttaagggttgaaaatgttaagctaatttttttggctctaccgtacttagtatgctaaactgataggggatagggaacaggaaagatcagggtcaagaggcaatttttgtaataatatccaatatttgtagcttatgtcttatgtatattaagccttcagcagttttttgagattgattttgcatactatgtagggtttgctgaataaacctaaaaccttgatatatcaaaggttagaggctgataaacacagaaattagtgcaagggttttgaagggtataccggaaaaagtgtgcattttttgggatttcaagagatggcaaagaaattttcaaatctcctcctgactcctgactcctatgccctcacggaaagactttctcagcaacccctatgtactgaagaaccgctaatttttttacgttttgatatataaatttgatatataaaatattttatttgaaaaatgtgaggaaattgtgaggtttatttaattaattatcaaaatatatcgtaatattgcgaaacaaattgacaatatttacttcacatttcgttaaatttttatcttcacaagttcctcagattttatttatataaaaataattatggaagcgaaaagcagaataacttagtaaaagttagtaaaagcttctgcatcaaaatcaaaaaaatttgtaagttttaaaggactcaagatcatggtgcaaatgcgacccaatcaacaaagcagccaatttaacaaagaagaggctttagtcctgccttttaataccgttggtattgcagatataccctttgtcggtggcaaaaacgcatccttgggagaaatgattcagcagttgcaacctaaaggagtgaaagttcctacaggttttgctaccacagcttatgcttatagatatttcatcaaagccgcaggtttagaaaccagattaagaaagatttttgcaactttagatgtagaagatgttgacaatttgcgacaatgtggtaagcaagcccggtcgctaatgttagaaacgccatttccgatagacttgcaagaagcgatcacccgttcctatcaagctttatgtcaagaatacggtgaaaacaccgacgttgcagtgcgttccagtgctacagcagaagacttaccggatgccagttttgcaggtcaacaagaaacttacctcaacgttcacggacttaaaagcgtattagaatcttgtcataaatgctttgcgtcgatttttacagatcgtgcaatttcctaccgtcaactcaaaggtttcgatcattttgaagttgcactgtcagtaggtgtgcaaaaaatggtacgttctgacatggcttgttctggtgtcatgttctctattgacacagaaactggctttaaagatgcagctttaattaccgccgcctatggtttaggtgaaaacgtggttcaaggtgctgttaaccccgatgaatatttagtatttaaacctaccttgaaacaaggatttaaacccattctgcaaaaacgtttgggaacaaaagaaattcaaatggtttatgatttgggtggaacaaaattaaccaaaaatgtttccgttcctgaagcagaaagaaaccaatttgctttaaacaatgatgagatattacaattagcaaactgggcttgcattattgaagaccattattcccaagtccggggtatgtttacgccaatggacattgaatgggcaaaagatgggattactggagaattatttatcgtccaagctagaccagaaacagtccaatcacaaaaatcgaaaactgttctgagaacttatgttctcaaagaaaaaggtgatgttttgttaacaggtcgtagcgttggcgaaatgattggtcaaggtaaagctagagtcattctcgatgttcaccaaattaaccaattccaagccggtgaagtgttagtcaccaaccgcacagacccggactgggaacccattatgaaaaaagctagtgctattgtcactaactccggtggtagaacttgttttgatggagaaacgaaaattctcacaaatcaaggttttatgaccattcaacaaatttatgaacaaggatatcaaggattatcaactttagccctgaacactaaaacccatcagatggaatggaaaccaattatagatgcaatgaaacggacatctcaaataattggtgtgagtgtatctcaaactgggaaagttagagataattgcctacggttaactcctgatcataaaatggtcaatcttaggaatggtgaatataccaaaactgagattcaagaaatgttaaataatcaagaaatggtgcttgtatctgagaatattcccacattaggtaatagcaaaaatcaagcagcagatttagcttatcttttgggaggaattattacagacggttcaatttacaccagtcgaactcatggagaagtccagtttatccaaaaatctgtaccagaaaaacaagcattcatagctactatgaatgaaaaaatgaatgctgtttatggtaaatcttttgcgacttgtgagaaagcagtatcttcaggttacatccaaggaaaacaggtaacagtccaagatacagctgatcgtgtttattctcaggcgatcgcctatgacttaaaagaaaaagaacaacagattactcaaattcttttagagaatactccagaagtttcctatcaatttttaggaggtgtaattgatggtgatggttgctatgctaacaaccgcatcaacatctatatttctgaggagaacttactacaagctgtgattattgcttgtttgaaaatcaatactgttcctcaagttactaaaaaccgtaatatctacaatgtccaaattgtagaaaaattagagcaaattttacaatatacccaacgagttaaaggagacgttactccgcgaactattcaaactagattttttgccgctaatcaattatttagtgacaatgtaacaagtcaaatcaaattgagaagagataaaaacttacttatttccgataaacaactgggtgaaatgagtgagtttgcagaccttttacaaggtgatctgcgaatgcaacgagttgttaaagttgcagatgcagtagacgctgaagtttataatattactgttgccgatcatcataattatctagttttcacggacaaatatactcctgtagttgtttgtaactgtcacgccgcaattatcgccagagaaatgggtattccagccatagttggttgcggaaatgcgaccacagttttgaagacaggacaggaaattacagtgagttgtgctgaaggtgaaacaggcagagtttacgcaggcttgttaaactttgaaattcaagaattacctttagatgatttgcctcgtacccgcactaaaattatgatgaatgtgggcaacccagaggaggctttaggtttaacagcaattcctaatgatggtgtgggtttagcaagaatggaatttattattgctaaccacattaaggcacatcctttagcattgttgcattttaatgaattggaagacgaactagcaaaatataaaattgctgagttaaccgcccaatatgaaaataaagctgaattctttgttgctcaattggcgcaaggtattggtacaattgccgcagcattttatcccaaacctgtgatagttcggttgtctgatttcaagagtaacgaatatgctaaccttttgggtggtagacaatttgaacccaaagaagaaaacccgatgatcgggtggcgtggtgcttctcgctactatgatcctcgttaccgtgaaggtttcgccctggaatgtcaagctatgaaacgggtacgggatgaaatgggtttaactaacatggttctcatggttcccttctgtcgtactcccgaagaaggacaacgggtacttgatgagatggcgaaaaacggcttggttcgtggtgagaacggtttagaagtttatgtaatgtgcgaattgcccagtaacgtgctacttgcagacgaatttagccaagtctttgacggtttctctattggttctaatgacttgacacagttaacattaggattagaccgagattcagagttagttgcccatttgtttgatgaacgcaacgaagctgtaaaacggacaattgctaaagcgatcgccaccgctaaagaatataatcgcaagatcggtatctgcggtcaagctcccagcgattatcccgaatttgctagattcttggtagaattgggtatagattctattagtcttaaccctgattctgtgatcaagacaatgttagaaattgcagaagcagaaggaatgtaggtaattggggactggtgactgggtaattaattttatttttcccaatcaccaatcaccgatcactaaatttgccagcaaaaagtgatctcctcctgactcctgactcctgactcctgactcctgactcctgactcctgactcctatgccctcacggaaagactttctcagcaacccctatctaggttttacatttgttcagcatcccctaacattgttgacaggcgcatctgtacgagacaaaatggaaatatgttaatttttggtggaaattgaattatatgtgctggtgtgtggagtaatttggagtaatttaaagtcttattgggctttttgttaataagtttaatttttgatttacagtggattatctatagctcctaaaaagaaaatcagcttcaacaaaacaagacattattaaatttttgcgagcagttattgacgtacgtatatttttattctaaaatttacttagaacaaaattactatcttgagcaagaacatgaacaaagacaataaagcatcaataattcaggtttgataaccttattctcaaaaaaagctggcgttaatatcatgtttggtgagttgataatgatcacgcgatttgtgcaaaaatcggaaaattatctttttttctgtaccctgcaatcctactttcttaatgaaaactctaaacaaggacaggatataaccagcacccattaatatatttcaaattatatactatatgcaattaaacgatcatctgtttacttcaaagagtgtacatcaaattattgatcgttgtcccttgaggattagccctgatagccctgtaatggatgctattgtcttgattcaagaacaaagtaacagcccaaaaatagtcaacttcccagaatcattaccaaaaagcaaaagtagaagctatgttttagtggtagaagaaaagcatttattaggcatatttaccctgagagatgtactacgtttaaaagctcttaactgggatttatggaatacaaaaataactgaagtgatgacaaaggaagttatcacactaagagaatcacatttgcgagatattaccacagttttgtcaatcttgcagcaacatggaatccatcatttgcccattgtggatgatagggaagaactggtaggagtagtcagagaatgtgatctgttagcagaattaaatttagtgcaaatagttggtgtagttgagagtttacagcaatatttccaagaatcagaacagtccacacatacatccaataaatgtcaatatcatcatcatacaatagaggaagaatgctgtaagactcaaaatattatacacagattggtagcagagaaaattgccaacgagataaaaattaacgaagaacttcagcaaactctagaagaactgcaaattgttgaagaagaactacgccaacaaaacgaacaacttgttattgctcgtgagattgtagaattagaacgccgacgctaccaaaatttgtttgagttgacaccttatggttatttagtaaccgataaattaggcattattcaagaagccaatcatgcagcatcaaccttactatctgtagactcaaaatatctagtaggcaagcccctaacaatttttattactcaagaagaacgtcatacatttatatcccaactaacagatttagaacaatttccagaatgggaaattagtatccaaccacgacaaggaaagccatttcctgctagtgtgaaagtagctccaatgtacaattctcaaaatcaacagagtggctggatgtggttattgagcaatattagtgaacgcaaacaagctgagacagcactcattaaagatactgaagagttagaaaaacgagtagcagaacggacaagagaattagtaattgctaatcaagctttgcagcaagaaatgaaagagcgcaaggaaacagaatccgccctgcaaaagagtgaggagatatttcggcaatttactgaaaacatggactcatatatatggattggtagccaagattgcagtaacgtctattatattaacccggcttatgagaaaatttggggtcgttcctgccaaagtctgcgggaaaatcctctatcttggatagaagcaattcatccagaagaccttgaccgcttgatggcagaagtggaggtgtatcatcaacaaggtggaaatgctagttcagaatatcgtattatccatcctgatggatcaatacgctgggtgttgtccagacgctttccgatcaagaatgaacaagggcaagtggaatactatggtggcattggtgaagatattaccgagcgtcaactggctgaccaaactttgcgagaaagtgaagagcgactaactttagccctcgaagcggtcaaaatgggaatatgggattggaacgtgatcaccaatacctatatatggtctagtcatgtaggtccactgtacggattgcccaatggtagtttgtgtccaccaacttgttcagatttcttagatttaattcatcctgaagatactcaggtttttactcaagcactgaatcttgccatggagcaaaaaaccgagtttagtgttgaatatcgggctgtttggcctgacggtagcctacactggttaagtaccagaggaaaagtctactataacgaacaaagtcagccaatacgggtaattggtacaactagagatatatctgagcgcaagcaaaaagaacagcaaatttcggatcaagctgctttattagatattgctactgatgctatttttgtgcgagattttgacacaaaaatcatattttggagtcggggagcagaaaggatatacggttgggctaaggatgaagctgttggtaaaaaccttcaggatattttctgccctcaaactgcactacaaaaagaagcaaacgctctgaaaacactagtcaagttaggaaattggcaaggtgagttacgtaaaaaaaccaaatctggccaggaaattattgtagaaagtcgttggacactgatgtttgatgctgatggacaaccaaaatccatcttacttgtagatactgatattacagaaagaaaaaaactagaagagcagtttttccgtactcaaagattagaaagcattggtactttagctggtggtattgcccacgatttaaataatatcttgacacctattttaatcgccacccaattacttaaaggcaaacttgccaaaaatcaagaacgccatccccaaatgcttgatattattgaaaataatgctcaacgaggttcagctttagtcagacaagttttatcctttgcgcgaggtttaaaaggagaaaaaacaatagtacaagttaaacacctgattacagaaattatccaaattgctaaacagacattccccaaatccattgaatttagcactcaaatccctgaatatctttggactgtttctggagatactacacaactacatcaggtattaatgaacctggtagttaatgcccatgatgccatgccagcaggtggaatgctcacaattgctgcggaaaatatgtttattgatgaagcttatgcaaagatgaatcttgaatcgaaagttggacattatattgtgattactgtcacggatacagggttaggtatgtccccaaaaatagtagagaacatttttgagccattttttaccactaaagaagttggtactgggacaggattgggtttgtcaacagcgttaggaattattaaaagtcataatggttttgtgacagtttccagccaagttggtaaaggcagtacatttaaagtcttcttgccatctgcagaatctcctcaagttcctagtttagagcaattagacattaaaccgggaaacggagaattgattttgatagttgatgatgaacctcaaatacttgatgtggctacaatgatcctggaaaataacaattaccagaccttgactgctagtaatggcattgaagcgatcgctctttatgcccaatacaaacaggaaattagtgtagttttaatggatatgatgatgccagaaatggatggcatcactaccattcgcactatgcaaaaaatgaacccagatgtacaagtgattgcttgtagtggactgggtacaatagagttattgccagaatcaggagaaacaaaagttcaagcagttttattaaaaccctatacagccaatgatttattacagagtttaaatcaggtaatgggtaattgacaattgacaattgacaattgacaattatcaattatcaattatcaattatttttctcctatatatatacctaaagagtgagcaatttggactaaatcacatttaggatcaacaagagcaggactttgatctaaagcatcttggatagggacagcgacaacatttccattttgccaagctaacatttgatcatatttttcttgggcaattaaatcaacggcatttttaccaaaaactgtagctattagacggtctaaagctgaaggaataccacccctttgaatatgtcctaaaacagaaactcgcgtatctattaaattgctgctacagttagaaatttgatcagcgatatattgaccacgaccacatttagctacagaacaactagcaggattatccaaatcttctaaactagaattagcaccttcagcaacgacaatgatggcaaatttacgccgccagcgatcgcgcaattcctgtaaatgctcacaaatacccttcacagtataaggaacttcaggaattaaaatcacatctgcacccccagcaatcccagaatgtaaagctaaatggccagcagtacgccccatgacttccacaatcattactctgtcgtgactagccgccgtaaatgtgagacgattaatagcatccacaaccgtatttactgccgtatcaaaacctattgcacgttctgttaaagctacatcattatcaatagttttgggaatagcaactaaattccaattacccatatttgctaattcatggataatctttaaactaccatcaccacccacagcaattaaagcatctaaacccaaagcttcataactagctaaaattgccggtgcagcagttaaagtatcccctttattaatactacctaaaatcgttccccccatattaattaaaggatcaataccacgtagatcccaaccatgtatatttaaggggacagtttgccgttctaataaaccttgggtggcataaggaataccgacaacttcccaattaaatgtaagagtcgcatgactaacagcagcacgaatcacacaatttaaaccaggacagtcaccaccacttgtaagaataccgatacgttttttcataggatttcaggatttcaggagttcaggagtcaggagtcaggagtcaggagttcaaggagtcaggagtcaggagttcaaggagtcaggagttcaaggagtcaggagttcaaggagtcaggagttcaaggagtcaggagttcaaggagtcaggagttcaaggagtcaggagacaggagtcaggagtcaggagtcaggagtcagtagtca

SEQ ID NO: 61 - DNA, 33640 bp, Sphaerospermopsis sp. LEGE 00249
  LEGE00249_76
tcagaaaagtattcccaaatgcttttgcaaatgggatagcgagtgtcgccgttacaccagtaaaggttctgccttttaaagtgccattctaaacagatggatatttgttcagtttagcacgaacggttttaaggaatttaagagccgcttgtaagttgttgaaccgtttagtcatatatagttaatcaattctattcttatagagtaatacaggaaaatagccaaaatctttgtaccgataagttaacttatctgcaaaaaattcttacactgcgtttactttttggattacgcttcttagccctacttctgctgtggctactaaattaattgatcttctttgcccgtgcaaaagtaactgagcgtatctaaacctaacatctacggtagggcggcggataggcttaggctgggattgaccatagacaatttgtgaaccggggttgttaggataggacctagtattttccacataatcctcatggtcatcagaaaaaggtttttgaaccacattcaaaacagcgttcgcgacccttctaccttccattttggatgcacatagaatccgtaaatctaacccgttttgaatatctctgtaatagtaataaaacttgcctttgttccaaacaaaaattggtgtagcgaaagtatttttgattctcgtggctaatgcttccgcttttgctcttgagaaactcgatgactcttcatccattaatctaaaggaaatttccccagtacaagcccttgttctttcagcgatgaaagggtggcgttctttaaaatgcaaattaacttgtggcttgaaacttcgttgtccttgcagttcatcaaggggcatcccataaataggagtttgtaccgattggcagtacccggcatcaaactcaaatagcatctttcttaaaataatcatttctaaggtgtcagcatctgtaattttacaggcgtgttttaaagatgctttaggagtggatatatcattatccggctggtttctgaaccagtcgttaacccttttattatgccatctcttaacttgatcctttaaatgctgtgcttcattgaaattattaggtaaacccatcagtcgtccgcctccaaatcctgctctgtaatttccttaccaacacttacagatttagcagagtcctgctcaactttcaccttcgacgcttcggggattgtgattgatattttttcgcctggtaattgtccaatatctttttgtagttgtgccgatgcctcttctaattcttcctttgctgatttaactgtcaggggttgagttgagacagtttcaaccacgctcgcagcgtcgtttaatgattgcaatttagttaaaactggattattgaagttggggcttggattcatccatccataagctttttcactgacaacaccccacgctcttaaagcattacctattttccctgtttgcccgccaataactgtcaatgcttgggtcatggtatcgcccatattcaatagggatgagaataaatttccggcactttgataaattctatttgctgctttccatgcggctgataaagacgcaaagttttcagccccaataactctagaaatcaaactagttatactccctctaattaattccgagatattatattcagtcccctctgaatcttttaattcggcaagagaaacgatattttgcattgacgatatcaaagttgtcgtcactgaacttgataactgtactgcattatgaattgttgcagctaaagtcatgtagtttaccgctcgattgacgatatcccactgggaaaagcgattcatccaacccgacaatccatttgcgatttggtcgcctaatttattatttattacatttagtagtgctagttgggctgcattggcacctgtgttaaataaattggcgattttatcaaatagattgtttgataaattattcccgatgttttgtatagcggtattcccacaatttccgggctgtaatgtctgacaagttccagcagccgctgctgatgtagcaacttgccggaatgcgggggatgtggaaatagctaaaactgtggcggctggaatagcggaaagtccggctagtttagcgtctattgctgttaagcgagataagactggcgataaatctatactccccatggtttcgttcactaaattagtaatgttatttgtaacgtaagtgttaaaagtattcgtgatattgttaaggatattgttggttagattgttgattttatttaaaatgtagttcacggttgactgcaaattgttcacgacattagtcaaactagtaactgccacctttgcttgcgtggctatatccctaataccaggtaattcttgggcgattgcaccaattctagagagggcagtatcagctttagaattagcagcatcagccttggcacttacaccaccaattttttgatcaacttcatttactttagtaattgcctgattagcaattgaattagcagcatcagccttggcacttacaccaccaattttttgatcaacttcatttactttagtaattgcctgattagcaattgaattagcagcatcagccttggcacttacaccaccaattttttgatcaacttcatttactttagtaattgcctgattagcaattgaattagcagcatcagccttggcacttacaccaccaattttttgatcaacttcatttactttagtaattgcctgattagcaattgaattagcagcatcagccttggcacttacaccaccaattttttgatcaacttcatttactttagtaattgcctgattagcaattgaattagcagcatcagccttggcacttacaccaccaattttttgatcaacttcatttactttagtaattgcctgattagcagttgaattagcagcatcagctttattgtttgcaccacgcgcggctattaaagcatcttgggcattactaaaagccctgttagcagttgaatcaattgggggaatttttgataatgcactgtcagcttttccttctgctctttctgcttgagattttataggaaaaattaatcctaaaattttggaaacatcatttccaagcgcactcaatccaccctcaacagcatctatcctctctcccaaaacttgtaatgtagctattactcctaaaatagctgctatttgggcggctatccccgctaatttagctaaagccgtagcagcggcagaagcggcggattgagccgtagtggtagcagcagcagcagcagcagccgcagaattagctagattaacagcggttgatatttgtgcagctagtggggatattgcaactgcaactgtcgtcccaattataggaactattagattttgagcgccttttatggattcatttacaatatttggtttttcattttttaaaatatacttattatctaaagcagccacatcggcacgtaaagcagcaatttctgattctatagaagtacagcttgtcatcggttttatccttgagttgttttattgaatgactttattaaataaaatttactacgactgcctgatagttgaaatcaaacgtctaatatcagatattgaattgaagatcgagttgcaatcaaggcaacaatcaccgcagtctaaagtatttggcggacaaccttgtatacactctactgaatagttattagttgaataagattgacttaataaaatagttccagaatttccagtgatagttaaatgtacgcctcctaatggtgtttctggattaccacaagtcactgatttatcaactaataaatctggtgcagatgggtaaattgcattaacaccttgccatataccttcacaatcgcgccaatacaccgctgtcatccattgcatattccatattgcccatccatagtaattcacaattttatattcatagcagattggagatagatatttattgttattggttgaccaaaaagttatccgatatccttgtggatcgtagttattttcaaattcccctatatattcaacattaattgttataggagtatcactaaaatcctgaatactcccatctggtaaggtaacgcgggcagtgtcgcccgcttggcaataagtgaccattagtaattatctggatcgattacagtgccatcatctaaccttgcaaggttgattacaaatggctgatcaattcgataattatcgttattcgtgccacgggtttggaagctggtaaacccattggctatataaattgattggtcaacatttgaattgaaattagtttgagataaatattccttagctttaatcaagatactaactaaatgcccctctgctgtagctgtattaggggttgttagtcctgttgcgacaagaactgaatcagggataaaaagccctgaactgggagccgccgcgccattatccaatcgagtagcgccggtgccgaaaatctgggtaattgttggttctgccatgagtagaattagtaatgagattttattctactcactaactaaggagtttttgaggtgggatttcccttagctttaagccaaaattaagccaataaatattttaaaattctgggatgtatgggtgatctgagatttgaactcagaaccagcggattaagagtccgatgctctgccgttgagctaatcacccatcaataaaaactataatagcaaacttttgaggctggcgctagtggggcagttgaaaaactggatgcaggggaaatttcacagtgaaggtgatttgctgatctgcattttcaacattaataataccgcttaaccataaatgatcggttttttccaaaggctattctctgaatgcttcgcccttacattagttattagtcattagtcatgagttaattctacccaatcaccaatcacctaaacaacctgtaagcactgattcctgtaaggataccgactaccaaccaggtaatagctaaaccgacaacttcacctaaaaataactgtgtccaatgacgtaaaaatatacctataaccgaaccaatactgagagctactgcccaacttgcacaactgaggaacatccaacaccatccccaagggagtgatgagggaatagctaaccaccattgcgccagtccaattactataccaccaatacccccggaaataattccaaagaagatgcggaaataaaacaactctgttgacagtacaaaccaacccacagcaccaacaccgatagtagtgatgagtacccaacctaagactgtggagatcatccagcttaaaggtaaaattttttgtctgaggagataagattggggaagggcgatcgcaaatccaccaatagcaacatctaacactctgacatcagacttttcaccaatttcaatcaaaaataaactgaagataaaactacctaaagtagtcaaactccacaccaaagtaaaagtatacaatttactgaatttatttttgatagcggctaattccattttatttttgggaaattatactttatttaacacaactgacgcaaaacagaataaaagtaggggtaattcatgattacccctaagcaagaatggagtttttagtccaatcttacgtaagttctatttaaatttaaaggtttaacagccttattggcaaacatctctaaaaaagccttacgtcgtttttggggtgattcaggagagatgtaaccccacaaactttcccaatagaagaaagaaaagccaaaaaatttatgatctcgcacaatttgtacctgttctttaatactttcaatatctacaggactaagtaaagttcctgtagaaatgccaatgctcacaggaatcttcttcattgctaattttaccgcaggtttttcaatttcggcaataaaagattttttatcatctcgatatacctgcaaaatcaattcatctacccaacctttatttacccaattttcccaatcttgtaaataatatttataggcaaaatactgagaattaggagaaagggatattttcgcttggggcttaatttttttgactgcttgattgattctgcccataaaatcagtaatcttatctgccctccaccgcatccattttgcatcataaggatcagttggtggagtctttcctaaatgttctttttggtaaagtttaactgtaaatgaatcataaccaaattctacaggcattccaaagtgatcatcaacttgaatgccatcaacatcgtaatttttcacaacttctaaaattaaacccaatataaattcttgcacttggggatggagaggatttaaccatacctgccgattaaaaacaccattctgcttaatttcttctgggagattttcgtgaacagaatttatgcctttttgcccactggttaaccattctggatgtgcttttgctaaagcagaattagggggagtcataaacccatattcaaaccaaggaatcacacttaaatttttattttttgccaacctgactaacttctctaaaacatcatttccactatttatgaaattcaacaaaggttcggttttttcaccaattatactttcagcaaccttacttttatagaaagtgtaacctctattccaaaccactggataaatagtattaaaattcagtgctgctaattggtttattgccctttcaacaccccaaggtacaaaaagcacaccactagcaacattagtcaaccaaacaccgcgaacttctgtagttaaaaaacttgttttttgagaaacaatcgaagttgaggaaatcggaaatatggttaaactgaatataaaacccaaacaaattaagaaggaaaaacaacgatgtattaccctattcatctgctaaataaacttaggttactcatatacagcaggagtcaggagtcaggagtaaaactggttttgtgtataggttttaacttatattctgtattgctgcctgacttcccactcaattctcctcaaggtttttttcgattttttcagcaaaccctacttgactaagtattgcaaaaattatctaatctaatctccttccaaatctcagaaacctgccaccctgtgttaccaacagaatgaactatgggattatcccgcacaggaatataatcaggaacttgattttctatatctatgactcttctctcctcaactaacggttctggttcattagtaatctcagttagaatattttcctcttctaactccatactcttgattttatcgagaagtaacttttcagattttttaattagtttcatatttgatccattgaaatgaaagttttgaaaacttcatacagcagtttgagaatcctatcattgattttcagacagactaggatagtctttcaataaagttttgaaagatccgcaacaagctttgatgaagttgaattgcacaaaattaccttgggaaaactatgatacaacaaattaatgatcaataggtgtattttgctaaaaaaatttcttatatattttagatatctccgaaaattacataagcataacctgaaacccattcgtagggacaattcatgaattgtccctacatctttttcggagaagtctattgtattcatgttgctataataagctgcttgacaaatacaagcaagtgctattgtgttatgtttctcattaggaaatgatatcccctactgtaaatgttttccctgtgactgttacggtatcatcttctaataatttacgcccccgtcgagtttccacctcaccattaactttcacctcaccattaacaatcatgattttagcttgacctccagtagaggctatacctacaaactttaaaaactgatcgagtttaatcattttattgaaggagttaggagttaggagtcgtaagggcgaagcatttgggcaacaagttatcaattttataaacaggctattttcctgtaagggcgaagcattcgggcaatcaattatcaattttataaacaggctattttccgaatgcttcgcccctacttcgcccgtacaggagtcaggagtcaggataaatattactaatagacatctccggtaatgaaatgtgcataacctgaaacccttgtagagacgttctatagtctctacattgattgtcggacaggtctaatgactaatgtatcatcaaattaaaacctttctacattagcaaacttttgaggtgatgcttttgcagcttctccacaggtgcggggtgtaggaaacattttaccaggattagccaaaccttgaggattaaaaacttgccttacccattgcatagtttctaaatccgtatcactaaacatatcaggcatataacattttttatcagcaccaatgccatgttcaccagaaatactaccaccaactttaacacataatttgagaatttctccccccacttcttccactttttccaattccccaggaatagaattatcaaacaaaattaaaggatgtaaattaccatcacccgcatgaaaaacattggcaattctataaccatatttttgacttaaagcctcaatttcattcaaaacataaggtaattgtgtccgaggaattaccccatcctgtacataataatctgggctaacatgacctgctgctgcaaaagctgcttttctgcctttccacaattttaacctcgtttctgggtcagatgcagaagtgatatttctcgctccattttgtaaacaaatatcagccactctttttttattctcagcaacttctacttctaaaccatcaatttctactaataaaattgctgtcgcatcacggggataacaattagtagcaaccacatcttccacagcgttaatactaatattatccatcatttccatccccccaggaataatccccgcactgataatatcagaaacactagcagccgcagcttctacactggtaaaatctgctaataaaacacaaattgattcggcacttttgagaatttttaaagtgatttctgtggcaattcctaaagttccttctgaacctacaaatacacctgttaaatcataacctggcatttcgggaatttgtccaccgacatcaacaattgaaccattaggaaggacgatttttaaacctaaaacatgattagttgtgacaccatattttaaacaatgtacaccccccgaattttccgcaatattaccaccaattgagcagataatttgactagaagggtctggtgcaaaataaaaaccagcaccactaacagcttgtgtcacccaactattaataattcctggttgcacaactacacgctgattttctaaatcaattttgagaatttgccgcattaaagaagtgacaattaaaaccgaatcttcaacgggtaaagcaccacctgataaacctgttcctgaacctctagcgatgaagggaacagaatattgattgcatattttgacaatttctgctacttgttcggtggtgcggggtaatactgctactgtgggacgttgacgatagctggttaaaccatcacattcgtaggttaatagttcttctttgcgttgcactactcctttttctcccagtacagcaatgaattttttgatgatgggtttccagttgatttgttgttgattttgggatttttcttgggtttgcatcatggttttttttatgggtggtagatgtttttattttctcacgcaaaggcgcagagtcgcagagaggaagagagatttttaggctactccataatctgtatagggacgtttataaggaggatgtaaacctagtacaatatcttctttgggaacgcccatttttactaagtctgcggcgggattttcttctgttaaattttgttgtagccaaattttgccgtttttaatatctaggtggatgatagttatatacacgcggtttaaattttcccatcccacgttcatccattgataatggtcgttttctgtgtcaaagatcagttgtacatctacttcgttagtggaaatatcgtctttggcgtaatttgtgagtagggttttaatgtattctcgatatttggttattttatccattttacaatcacctcattctctggttcatataccactaataaaacttgataccttttgagagctatttgtgtaaactcaagttgaaaaaatgtctgataaacttcaaatggaactgccatatatagtatacgatctgcttcaatagcttctaaagccagacgataactgagaaactgacccaaagcagcataaaaatcggtaatagcggaaggattgataaaacttttgatttctactgcgattttctcattttctctttcagcagcaattaatttttcagcacctaagtcaattttaaatttgacgctgccaaatttgaattttagtggatcatctgtaattaaccactgctctttttgtaaagcggtttttactgcttcgtgaaatatatcttttgcagacacgggtaacaccaaatataaactagctacctacattttatggggaagatgggagttgaacccacaaccgtccctttatggttcaattctatttttttaatgaaacgcatagacgaagagaatgcagagaaaaagaatttttatcctcttatcttcctccgcgcctctgcgcctctgcgtgaaataaaaaaatcctctaattttaatatttcctctcttttggttcaaacatattcaccaccactggcatatattgaatatcaatacccgcaggtgaataatatgccattgtatgcttcaaaaacttctcatcatcccgatttgggaagtcttcccgaaaatgcgctcctctactttcttgacgattaaatgcagattgtaaaatcgtatttcctactaccattaaactttttaattccaacgcttctactaattccgtattccaacaactgcctttatcatctaaataaatatctgtatatttctgttgtattgctcctattttctccaacccttcactcattaatttagaggttctaaatactccacaaaattgagtcattttatcttgaaattcttggcgaatttgatttatgcgatattttcctttttgatctaataaactttgaatttcttgttttgcttttgttatatgatgttgttcatttattgctggtaatttgcggttttgcacatatctagctatactcgccccggtacgtctgccataaactacacattctaacagcgagttactacctaaacggttcgcgccatgcacagatacacaagcggtttccccagccgcaaaaaaaccttctaccaactcatctgcactgcggcgcacttgtccatctgtgttcactggtataccacccatgcaataatgaatagtaggacgtactggcatgggttgggtgactgcatctacaccaactaaacggtgtgcttcttcccagcagaagggtacacgactcatgattttttctttacccatgtgacgcagatccaagtaaacaaagggaccgtcggcactaccgtcagtattaatacctcttcctgcgcgaatttcgtaggcgatcgccctggatgtaatatcacggggtgcaagttccatcctacttggggcataattcgccataaagcgatcgccatcagcattaattaaataagcaccttccccacgcaccgcttcggaaattaatacccccactggatacaaccctgttgggtgaaattgcacaaattccatatcttccaacggtaaaccagccaaagctgtcattgccaaaccatcaccagtggaagcataatcattagaagtagtgttataaacgcgaccatatccccccgttgcaaacatcacggctttagcccgcactacttcaatatgtccatctaccaagtgaaacatcaccaaacccttagcctgtccatcttccaagatcaggcgcattacataccactcttggtaaatttgcacaccatgatggcgtaagttattgactaattcatgtaaaatggcatgaccggttttatcagcagcgtaacaggtgcggttgtgagaatgtccaccaaaagccctttgggcaattcttccatccggtaaacgggaaaataaaactcctaaatgttctaaatcaattaccacatttggcgcttcttgggtaagaatagctacagcgtcttgatccgctaaataatcagaacctttaaccgtatcaaaagcgtgtgcttcccagctatcttcaggatcaacattttttagagatgctgccattcccccttgggcagccactgagtgggaacgaataggatgggttttagcaacgacagcaacttttaaactgggatcagttctagcaatctctaacgccgctcgacatcccgctaaaccaccaccaacaataattacatcatgttctaacattttattttcaatccttaattccaaaaaaataccctgtccataaacagggatactattcttcattatcaattcttagtttattcccaatcaccaatcaccagtcaccaattaccaatcaccaatattaactggtagcttgaactggctgttgttgagaaatattaccaggtataggttcagtttttgttcctggttctacggcagccaattcgatatgatttaacaacgtggtaacaaaagcaaacagcaagaaaggcaaagtgagaacaatcacaagtcctaccgtagctaaagcatagactggtcttctagcgcccatcaatgctaaagctgatgccaaactaatggtaattgtaattaaccaagcaatgatttgaccgtatatatcgccaaatgtcaaggtgcagacaaagcgatagttttgaatattattcttattcatcattatttgcctcaagtctatcctataggttctaccttagaaccatgtttggctgacggacgatttctcaatatttttccaaggtttgtaatatcacttaacaatttagtggttttttctcttgtgcaatacaagacttacacacctgtagaatggtctgtgatggcgatctagtcatagttccgagctttgttaaaatttcttgttaagaatttctgtataattaatcagatatcagtcaaccctacagatgaaaataccacaaataacactgtagtaaaattatatcagtcaatttattgattcccaactagaacaaatgagtgaaaccagtccacgcagaataattattggtgatgtacatggttactatcaaggtctaatgatacttctgaaggaatttgcccctacatcagcagatcaagtttattttttgggggatttaatagatcgtggtccacaaagcgcacaggtagtagattttgttaagaaaaataactatccttgtttgctcggtaatcatgagttgatgcttttaagtgtaatgagtaaggattttaactctaatcaaataatacaggcatggctttatagtggcggacaagcaacgattaccagttatcaatcagcacaaattccccaagaccatctagattggttggcaaatctaccaacatatcttgatttgggagatgtttggttaacccatgcaggtgttgaccccagaaagtctgtctctgaacaaacctcccaggaactttgctggatacgtgatgaatttcacagcatggaactaccatactttagtaataagttaattattgttggtcataccatcaccttcactttaccaggggttgcccctggtcaattagcacaaggagaaggctggttagatattgatacaggtgcttatcatccccgtagtggttggttaaccggattggatattaccaacaacttagtttatcaagccaatgtgtttaacaacaaggtgcgtactttgcctttggaaaaagcagttacgaggatttcaccacatcagatccaagtcagtcgtcgccataagcaacgagtctattgacacttgcctgttgaaaaacaatatatcatcactgccccacccatgggcaaaccgttcgcctacatccaccgcctcaagtatgatcaagtatgatcaagtatctccagcaagttccgatacttgagggggggtggttttggctcactcgattttcttataagctgcattatctaagccatcattgctatgacttggcaaactgtctatttggcgttgaagtgacttaatgcgatcgcttgctccagggtgtgtactcaaaaaggtgggaataacacttcttccctgtaactttttcataaacgaaaccatcgcggagggagcataaccagcctgtgttaaaattcttagtcctcttgtgtcagcatcatattcatcctgacgactgcgaggacggttgagagctaaatcaacacctatagctacagcttgactgcgatttaagccagtagctgttgctataccactagcgatcgctctttgtcgcatctgcttaaccaagtgtttaccctcaatatgccccatttcatggccaataacactcgctaattctgcttcattttccgcagcttgtatcaatcctgtatttatataaacgaaaccgcctaaagttgcaaaagcatttaccgcatcatcttcaactacctggaaagtataaggaatattagagcgatcgctattagctgctaaccttctaccaacttcctctatatagctagtaagctgccgattccgggaaattctgacctcttggcgcagttcattattcatctgcctaccaagctcaacttcctgacgagtagataaattagataattgaaatacttgtacacctttgaataaaagtggtaataagtctatggcttgactgggcaagggtgtactcaagcacagacttatagcaacaattactgaaatcaacggatataaccagcgccgccgccatacacggtaacttgccaaaaatttattgcagttaatcataataatcagcgtgacaagagagttgtgtgagaactgaaaataaggacgcatttacagcttactaggttgcattctcaactcaatccctaaagtctacgctatgattaaaaatcagaaattgtcaactgttctatcagccagcctgatcctaactataccagccatgatagactgtcgcataactgcactattcaaccgtattaattgattatctagttgattatctagtaggaacaattgttacttcccttgaaaactctgttttaattcaccccaacctcaaaaaaacttgttatgcgtattttagattccaaaggtcgcttattcggcaaaatcaacttactagatttgggtgctgcgctggtaatcttattagtgatcatcggcatctttatatttcctggaacatccggttctgttgctcaagtcggcacaaaaacagtacctattgaagtagacttagtagtgcgtggtttaaacgtccgcgatcctgagcagttatttaaacaaggatttatcaaaggcggtaaaacaaatgtaattattcgtaatcaaccctacggacaaattggcattaaatctattcaacaactagcaagaactgtcactgttccccaaccagatggtacagttaaagaattagcagatccaagggcaaacaattttagtacagattttcttttgacattagaaggcaaagctcaagttactgatagtggtccagttttaggtaatagtaaagttaaaataggtatgccttttgaattagaagggtttaactataatttcaacgcttctgtcattgatattcgtttacaagataaataatattttggtaatgggtaatgggtaattggtaatgggtaattgtgttattcattatcccaatcaccaatcaccaatcaccaatcaccaatcaccaatcaccaatcaccaatcacccatttagccaagttaaaaacttacgaattaatccaattgtcaccgcaggtaattctaattggggagttaatcccacattttctaaaggttgaaaaaatctaatactttggggattcatttctgaaaaacgacgaccaatatcaggacctgtaaattgtgatttttgtccccaaataatagcagtgggagttgtcaactgttgaatgtaaagagataaatcaaaacataagtctccccgaacaaaagataaagctgcatattcagcatttggttgttgggcagattgtaaataagcgtctacaatttcttgataaactcgatttgactgggcaaattgtcgttgctccaaaaagctgcgaatacctgcatcagtagcaatacctgtactatatagcaaacggtcaaccacaggtacactgatcaactgggcaaaaaaactgcgagagtagtcttggccaaagtcagaaagtccagcaggactgacaagaattaaagacttaaataaatcgggacgagcgatcgccactctaattataaacgctgcggtcagagaagaggctattacaatcaccggctttgtacaagtctgctcaataaactcttgaatggttgtcaaataatcctcaattttgtaactgcgttgcggatgttccgagcgaccccaaccgattaaatctggtgcaataacttgatattcagccgcaaaagctggatatactttcgaccactcataagcagaagaaccacctccaaaaccatgcagaaacaacaaagtttccctgtcagattgttcgcttttgtcttgccaaggagagccactagcagtataatatacaatcctacctaatgaggtatttatagagaattgctcaaatcctagaggttgtaacataagtcttatttgttgaagtttgtaactaatcccagtcgtaccacttaaatagctctaaaatgctcaatgattgggtacaagttttccattcttgtttattattaactaactgattaagcgttagattaagcacaggttagatttgtcggcggaacgtccatgaatcaaatataattcttgaaaggtggacattctgtccccgaatcaaaaaatctgatattaaataggtaaaaactgtgacaaaggcttcgtcttcttggcggcaattaatcaaccggcttccagagattaagacaggaagcccaaagccgcgaagattaaaacatttatctgaacctggaagcattcttggtttcttaacaatcatcgttgctatgctgttttggaactggaagttgttgttagcacttgcagttggcattggagtaatgctcatcgcttatgcaatacctaaatggaactggcaaataagttggttagaaatacgcaggtatttaaacagtgctaacagtcggttagctttagcagttgctagtggtggtattgctacttttatgacttatatggccgctgccatttgggttgattctccaagtctctggatagctgttggtgctattttgcaaggttttgggacattactaactttaattttgttggtgtggcaaatcttcagctttcacggaaatcaagaggaagatcatctggaacaagtgttaaataacttaacagaaacagatcctttaaaacgcttgcttgctgtgcgccaactaactaaattcatcactcgtaaacaagttgatgtttcagtaaagcaagatgttattgaatgtttgcaaattttattgagtagggaagaggaaacggtagttcgccaagcagcgttgaatagtttgcaaaccgtagacggtttacaaatggtaatatccagcactgccaaacctcttgtacccataactcaaaaaatctctacaactgttaagcaagaagtttattagttagggtttgctgagaaagtctttccgtgagggcataggagtcaggagtcaggagtcaggagtcaggagtcaggagtcgtaggggcgaagcattcggacgacaaattatcaattttatgaaaaggctattttccgaatgcttcgcccgtacaggagtcaggagtcaggaggagatttgaaaatttctttgccatctcttgaaatcccaaaaaatgcacactttttccggtatacccttcaaaacccttgcactaatttctgtgtttatcagcctctaacctttgatatatcaaggttttaggtttattcagcaacccctagttagttctcagggaatggggaatggggaatgaggaattgggaacaggtagaaagttattctcccaccttatcaccaattacccattcaaaacccagcactgtggatactcctggcagtcaaccgataaacaaaggctttgagtacaaactcaggcaaagccagcattcgtcgccaacgccaaggctcttgatacaaacgatacaaccattctaaattgttatttgccaaccaacggggagcgcgagtttttctcccagaccagatatcaaaactaccaccaaccccgatccaaattgcttgaggacagaaatggcggtttttagcgatccataactcttgacgtggtacacctaaaccaacaaatattacttgtggttgcaattgagttaaagtctgctgtagtatttgttcttcttctggggaatgatatccagagtgagtccctactatattcaaatctggaatttgctcctgccacaactttgcggcatttgcagctactcccgtagctcctccatagaaaaatattttggtgtctgttttttgttgagcgatttcttgtaacaatttttctgctaattcaattcctggacaacgttttactttttgcctgaataaataccgcaaatacaagactacccctgctccatctggaatcaccagatcagcattttgaattacttctgctagggagcgattacgctctgcttgcatagtcatttctgcattaagcgtgactacatgagttcccctaccttcttggaggcattctagcaaccagttgggatagtttgtcatcacatgaactggtaaacctaatactgaaaattttgtatctaatttatacatagtagattcttatgagatttacactaaattatttagaagcttagtttatcaaattttttcccagacggattgtaaatatcagcttactttttgcaccattcttctttgacctaaaaatcatcggtttaccagacaaggatggtatgaagagtagtaggctttgcgttatggaatcgtgggctattaactgctaataagtgatatcatgtacagctaattactaaaaatcaatagttttttcctgttcattgtgaagagttacctgccataaataaaagtatctaaaaatatggtcagatatgactgagaaagaggtaaaaaagcttaaactcatggtggtagatgatgagccagacaatctggacttactctaccgcactttttggcgagactttaaagtatataaagccattaatgcccatgaagctttggcaattttagatcgggtgggggagatggctataattatttctgaccaaagaatgccagatatcaacgggactgaatttttcagtcggacagtagaacgttttcccgacacaattcgtattttactgactggttttacggatgttgaagatttggtagatgcaattaactctggtcaggtgttcaagtacatcactaaaccttggaaacctcagcaactcaagacattagttgagcagggacgggatacttatactttagttaaaaagcgtacaagagaactccgctatgctctgaaaagagaatctttatttaatactgtaaccacagcaattcgagaatctttggactatgacaacagcctacaaaagattgtggtaactattggacaaacatttgctgctaccagttgtgtattgagaatagtagagagcgatcgcctgacacaaaaccagttttcctatcatgctcctcactccttagaaatcaccccacctctagactctatccctttaattacagaagttctccacacccaaaaatatcaattagctcaagatacttatgatcaaaatccttatcactacctagttgtaccttttagctaccagcagcacttactagctgtaatgactctttatcaatggggaagtcaacaaccttggcaagatgaagatatccaactaattacaggtgtggcagaacaagcagctttagctctctcccaagctaaactctaccaaagtctgcaagaaaaacaacagcaaatccgggttgaactgcaattagcccgccaaattcaaaacaatcagctccgtcaaaccttaccaaaaattgatggtgtaaaaatacaagcttgctgtcacccagcacgggaagtaggaggagatttttttgaagtttttgtccatcctcaaggtgatttgtggctggctgtgggtgatgtttccggtaaaggtgtaccagcggctttatttatggccagtgctatttctctgttgcgtcgggaattatctcacgaatcgccagcggagccgcatattgtgatgcaaaatctcaactatgctctagctgatgacttaatcagtaacaattattttattactcttgttcttgcatcttataacagaactacccaggaacttgtctatgctaatgccggtcacatttatcctctcttgtggtcgaaaccagtaactttagctactcaaccccattacctgaaaatccgcagtgttcctttggggattttaccccaatggcaagcaccgtcagggcgcttaattctctctcctggagataccctactattagctagtgatggaattacagaagctaaagtatcaataaattcaaaaggttctataaaaactgatagtagcactacacctaataacttttctatgctcaaccaagaaggtatttggcaacttatacaagagcagtttcaacctttatctcttgaaaatttactcacttgtattcaagcaaataattctgtgcaagaagatgaccaaactctactttccctggaggttttgtaactaatgaaaagtgagcttcatgtaccaagtgacttgagttgtatcaatatcgtcgagacttggttgttggtatgcttgaaaatccacttgggggactctgtagattggtcagaacaatcatctcgtttgcgtttggctttggttgaagcatacactaacgctgtacgtcatgctcacaaagatcagtctagtttgcccatattgctgcgtttagaactaaaagatcggaaattagcgatcgaagtttgggactatggtcaaggttttgatttgtctacctactttcctcctagtcctggacagaaacaagaaggtggttatggatggttaattatgaatcgtctgatggacaaggtagagtatcggttgcaggttgatggtgctaattgtctgaagttggaaactactatacccaaacaggttaactgaccggagattttagattttagattttagattttagattttagattttagattttagattttagattttagattaacaaatgtggttcgctctcccgtccttcaggacgagaaaatactcgctgcgctacgtatgcttcgctaacgtaaatccaaaatcccataatcagcttttggctgaaaaccttggtaatttattaagaaatatgaataaaattaataacttttgctaaatttatttgatttcttagtgatagttatcaaataatttaacatacaaggctgctttgcaaaattaggaacccagtttgggtaatcgaagagcctgaagttgatactaaattcatcaccttgcttatgaaacctttattctgcttatcaccccgctatcgtcttgatgatgaatctcgttggttagaaggtattgatcctagtcgtcactactggattgcggtgaatggagagaaaaaggtaacattagctctgccagggttaatagtttcttcgattgaagagtttaagcaggtgattcgcaagtttcgttctttacaaccaggcgaaatcttgaatctagccagaatttctaaccgttgtataattcggtgcataagtaataactgctatactatagaagcagaagtcaataatgctcctgtttgtcatctttttgaccaagaaactttagaaagtttgttaatgacagcacatccagactggcaatgtgcgccctcagatattgagttaggtagaaaattgttgttgcgttctttggctcaaccaagttttagtaagagttaatgcacttacatatatattaagtcaaaaaaggcacacatcctcgaattatcaagaaatggaggattttgatgttagaggatgttttaaaagtctctcatgatgtatcaaatattttcagatctccctaaatccccattgaaaagggggactttaaagaatttagcccccctttttaaggggggttggggggatcaatcagtgtcattgatgacaataaaaaacttttgaaacaacctcttaaatgctcccaaactctttgatatcctcagcctcaaaaaaaggaatttttggtgaaaaccctaattatattctagaggaaattaggcaatagattcagataatcgctgttctatccaagagttaaggcttttaccttcctgtctagcttttattgcaattgttttgtgcaattgaggattaattctcactacaaatttacctgaaaatggcttatctggttcttcaccgcgttgtttgcaaaatgctaaataatcatctactgaatcttgaaatgctttttttaattcctctacactactgccttgaaatgtaattacatctctaatattaataacttaaccgtgaaaaattgccgcttgatcatcaaattctactactgcttcataacctttatatttcatcattattgaaccctgcttctaagagaaaacgtcgtatagatttaacagcacctttgtctgtttctttttcaggatgtggcctatggaaaactgaccttaccccattgagcaagtcctaagttgacaatttactagacaaacctatacaagtacatacaaaactacaagtatttgacgtatacatggaataagttgactaaaaaattaggcaaaatgtgtcagaattaaataatatagtatagtgttgacatcagcaaatgcttttatccatcaaaacacaactcaagttaaataaaactcaagaaatgttaatggctaaacacgctggtatagcaaggtttacctataattggggtttagggacttgggcttatttgtacaaagatggattaaagccaaacaaatacatcctcaaaaaattctttaataatcatgtaaaacctgaattggcatggattaaagaaaaaggtatttgccagaaaatcactcaatacgcctttgatagtttaggtgaggctttccagagattttttaaaggacagtctaaatatcctaacttcaaaaagaaagggaaaaatgatagttttacaattgatgcaggtggtaaaccaattcctgtaggtggtacatcaataaaactaccaacaattggatgggtaaaaacttatgaaggattacctcatactacttgcaaaagcattactatttctaggactgctgatagctggtacatagctttttcttatgaacaagaatgtcagccaactattaaaaaacatgatgctgttggtgttgatttgggagtaaaggaactagctattcttagcactggtattacttttgctaatcctaaacactacaaacagaacttagctaaactgcaaagattatctaatatctactctagaaaggcttcatgttcaagcaataaacataaagctaaaattaaactagctagacatcatgcgagaatagcaaacctgagaaaagatactcttcataaacttactacttacttatgtaaaaaccacgccaagatagtagtagaagatttaaatgtttcagggatgttgtcaaatcataaattagctcaagcaatagctgattgtggattttatgagtttaagcgtcagctagaatataaagctaaaaagtttggctgtgaaatcataattgctgatagattttatccatcaagtaaaacctgttctcgctgtgggcataaaaaagaaaatctttctttatccgaaagaatttattactgcgagaactgcggttttgaaatagatagggatctaaacgctgcaattaatttatcgcgtctggctaaggcgtgaaagtctactgagggataactgctcccatgctcccgttgaagtagaaagtaaagtctagttttgtctaggttttatatagcagagcaattcttactcttgaaccagaaccctctgtgatttctgctcccagtgctaaaaacaaactttccacatcagtccaaggtatgtttgctctgactgggttctcaaaaatgtcttggagtgttttttggtgtttgttgtttagttccatttatatagtatcatagagtgatactattaccaattaatatgtgtacatattgacaagaattttagtttgcgtgagcagtgggaaaggttaacagctattttcagcccatactttgagataagtataaaaaatataactattttcagaaaatatactactagcttataaaaattacactttgttaaaatgtgtaaaacttatacaggctctatttcatgattactttactcaacgatgccctaacgctgacatacaaccaactaagcgtcttttctagtttaaatattttctggcaggttttagaaacggcttttggtacgcaatacaaccgtagttttgcggaaattctgcgtttacagtggcaagcaggtgattttagtcaacttccgcaaattgagattcttgatagcagtgttttgggaactagtgtttgagtttgcccgtgtaggtaatgttgatattacccttagcagtagtgatttcagtttggttgtgtagtctttagaggagacaaaaacagttttctcgttcccataatacagaatacgggagcgagagaaattattaattgtcaattattaattatcaattatcaattatcaattgtcaattattaatgattattttgattgtaaatataccagcattgtaggggtttagaattgcttaatggtgtcaacttaacgtaaaacccatcaccggactgggaattcattcccagtctaatagcaaaagtcatctaaagatgacgaaaaatatccaaaatttatatagctatagccatcaagattaggacgtaagtaagggtttagcaatgctaaacccctacgaaagatatgggtttttgaccacagatatttaaggttgattgtcaatatgtaattcctaaaattatcaattatcaattatcaattatcaattattgaatggcgtaatagtatattctttatttggtggacgcagggaaattaaatcttgaggtgaagctaaaagtttgattttagcttctagaatttcctgttgtgggttgaggataaataaccataaaacattaacactacaccaagaagtgtgtgctttacctgtaacttgaatttggattttttgatctgctgaattttcaataattccttggtggggttcggctttaatgtcttgcgcttcttgatggagataggaagcgatcgcatttcgtcccatcaccgcagactccaaaggtggatacatcaaaccatcttcagtaaataatgccgcagtatttgtaaaatcacctgcgtttaaagtggtaaaataacgcaatatagctggttctgtaattccttcaatagtaatattcatattttaaatcgcaggtaattggtaattggtaattggtaattggtaattggtaattttcctcctgactcctgactccttgatctcctgactcctaaaaataaattattcccaagtaattacctgggaataaaattgtaaaaagacattgaggttggaaggatatcagcaattagtcagctaaaggatcaacacccatttctgtaaccactttgcggaaaactgtaatttgctgaccaaaatctaattctttgagagtttgtaaaacttgtgcgccatcacgggaaatctgataacctggtggtactggtactacaaaaccttttgccattaattctgctaattcgtaccagaaagctaacttagtgttagcactgaaaataccataagagcgagaaacttgagtatttttttgaccagctaaatcacgcatcgcttctaactgctctgcatgagacatttgtttgatttgattcaacaaaccttctgccagttgtaatctagctgcacctgtagcggctggggtaatggatttacccatttctgtgtatgcgtaccacaaaactgctagttgatcatcaatgctgagggctttaaatacagcaatggttgaggtgacagtatcaattgtttggttgctgtagtttaaagcaccagaaaaacgggttgaagctgaatcagaagtgaaagtcattatattcaccacagtttattaactaaatttgttgttaatcagtgggaggtgggcatcactctgggttgcttgacctcttgtcaactattttgcattatttcttaacaaaatgcaaataaaatttacaaatcatagagttaaggagaacaaatgaaaaaaaagatgatattgtgtataatgtcaaagcaatttttctgattaactcctttgaggtaatttgaggtaaaaaattactcctactcttcctttgtgtactttgcgtactttgcggttcattaacagaaaaacttagcaactacaccaggaaggagcataaacatgaaaaagtgtagcttaactagtagtctcatcaaagagaaagcccaagagataggctttcacaaagtgggtattgctgctgtagaaggggtagacgctacagaaattcaaaggctgcaagcatggatggcaatgggttatcacgctgacatggaatggatgggaaacccaaaacgtcaggatattagtttggtaatgccagaagtgcgatcgctgatttgtgtggcgttaaattattacacaccacatcaacatccagaaggggaagaatacgcgaaaatttcccgttatggctggggaagggattatcataaggtactgcacaagaaactaaaacaactggctacctggttagaatcacagggtgaagggataaaagccagatattatgcagacaccggaccagtacaagataaagtttgggcgcaaaaagctggtattggttggattgccaaaaatggtaatctcattactagagagtatggatcttgggtatttttaggagaaatattaactaatatcgagttagagagcgatcgccctgctacacaacattgcggtaattgtacaagatgtatccaagcttgtcctactggggcaattacgcagccttttgtagtagatgctaatcagtgcattgcctatcacactattgaaaatcgagcagaaacattaccagaaaatattaaaactaacttgcatggatgggttgctggttgtgatatttgtcaagatgtatgtccgtggaatcagcgttttgctcaaataactgatgttacagatttttacccatatcctgaaaatttagcacccaagctggtagaattagcgcaaatcacagatgaggagtgggatagacgatttacagcatcagctttgcgacgcattaaacccaaaatgttacgaagaaatgcccgcgctaatcttgactcatctaaactaaaaaatgactcaaaaagtaatcatctttgattttgatggcacaattgcagatacagtagatgctcttgtaaatattgccaatcgtttagctgtagagtttggttatgtacaaatatctgctaatgaactgactctattaaggaacttaacctctagagaaattattagatattcaggtatatctttgtttaagataccttttttagtgaaaaaagttaaaggggaattaaaaaacaaaatcaaagatttagaatctataccaggaattaaagaagcacttatagaactcaaaaataaagaatatagattgggaattattacttctaattctcaagaaaatgtaagtgcatttctcaaatgtcatgatttagattatttatttgaatttattcactcaggagtaacaatttttgggaaaacaactataattaataatgtattaagacaaaagcaaatcaaaccacaaatagtaatttatgtgggagatgaaaccagagatgtagaagcagccaaaaaagctaatattaaagtagttgctgttacttggggttttaattctcctgaagcactagctaaggaaaatcctgattttttaattaatcatcctagcgaactattagaagtaatcaaaaattgctaagagattgtttgaaaacttgagaatctatcgagtctcaaggaacaataacaggggatgtcaaacgcattcctacttggccttaccaacttttatcagcaatcagtcattagggtttgccgaaaatataaaattattatgagagcgagaattgaaaataatgttttatttattcaccatgaggatgtaccagaatttaaaaaaggtggttcggtggtgagaaattcttatttttgggctttacgttctattgctggtcgtgctagacgtggtagtgattgggaatatgagtttgaggtttggttagcgttggcgcggatgttgatgtcttttactgagtcgggatatttgggatatagagaaactattttagagtttcccttatcccaaggtgagattcctagtattttacgggatgtgggaacttgggaataacgaaggcaagaggcagaaggcaggagtctgtttttgtcaggggtatttataccccacttcaaaaaattttcgcctttaaatgcgtggttgtatacccgatgtttatgatactttgcgaaaagaatattgtgggtttgaatattaagaaataggttcaaaaaccatttggggtattaatatttgatcttggatttttccaactcctaaaaagcggttgtcttgttcataaactcttactaaatctgaaatttcgagatttacaggaactttctgtccttgacaccattttttggctaatgtgtctggtaggcttacgggtgatagttgttgtaatgctgcatctgaggggatggtttgaaatgtgccggtttgcagttggttttctatgtctgtgaaggtgaggctgttttctaagtaaaatccgctgctttctgttctggttaaggcggcgagggttgctcctgtgtttaaaagtatgcctaagtcacgggcgatcgctctaatatatgttcctgcaccacaggcgatcgccaaatccaattccgggaaatcactatcacgccagtctaaaatctctatttttaatacttctaccgttctcactggtgcttgcacaatttctccttgacgtgctaaatcatacagacgtttaccttcaacttgaatcgcactataactagggggaatttgctcaattttaccgataaattggggtatttcggtttctatggcggttaattttaagccaggacaaggttgagaggtgataacttccccttgtaaatcatcagtagtagtacgcaccccaaaacgcacggtagctttataagctttttcaccgggtaaatattgtaataatctggtggctttacccaaagcgatgggtaaaactcctgtagctgctggatctaaagttcctgcgtgtcccactcgttttaaacgcaacagttttctgactcgtgctacgcagtcatgggaagtccagtcatcaggtttgtttaaattgataaaaccctgcacaaataattcgtaattgttaattagaaatagagcctacggaacgctggcgcgaacgtaattagggtttgctgagaaagtctttccgtgagggcataggagtcaggagtcaggagtcaggagtcaggaggagatttgaaaatttctttgccatctcttgaaatcccaaaaaatgcacactttttccggtatacccttcaaaacccttgcactaatttctgtgtttatcagcctctaacctttgatatatcaaggttttaggtttattcagccaaccctaattaattatatagcattttctatttaattacagtgtgggaataaagagttaaacaaacaacatcactaaaaaatcaacaaatgtagtagggagacaccaatatttaatatccaaaatccccatctgactatagttaaagagagtttttttttgggtatagctggttgatgattatgctctaatattggtgctaactgtagagtgttcagagattttacgagacttaaacctaaagattgactagaaatagtttgagcataaccagcgttgaggtagggaagatattgtggtttttgatatacaaaagtttggaaaaaaggcaaacttaaagaattgatgtaagcacgcgattgggaagcattaccaaccatgtttgggggtaatgctatttgttgacttccagggttactattaccaatgctagaaaaatgagttgcaccaacaagcataacaagatatttgtggggattagttaaccaagaaaaaggtaggatttgttcatataaagctggtgctacagtatcttcactgctaccaataaacatcacaggagtttgcatttgatttaaaccagattcaccaaatatagaactggtgatggggttaacagctatcgcggcttttattctctgatctcgtaaattaatattctcttgttgtgtagatttattttgcaattccaaagcgcgacattgcaacaataaagacatattccaggtatcttgtagcgcatctggttgacaatctttttgtagttgttgaaagttgatttttgccccggctaaagctaatgcagtataaccaccaaaagactgaccaaatattcccacttgttgcagatttaacttacctttaaattcaccatcagactggttagttttttctagtttatctaatatatattttatatctaaaggtctattaataaattcatttgcttcttgtagtttcctattatttctattgttgaaaaatagatgaggatgattagggacgacaacggcaaatccatgagatgctaagtgtttggctaaataacgaaagttactgctatctaaacccaagccgtgagaaatcacaattactggtgtggtattttgaagattgggaatataaatatccgttaataaatgtcgatctctggtgatatcaaaaaattccagcgtagattttttaaatgtaaaaataccaggattttgtaaatttgctaagaaggataaatttttcttggggatagtagcagcttctatttttgattgttgttgaagtatggcgatcgcttgctgagtttcactaattatattttccagttcaccagctatctctaagctatcagctaagttaagacgaatactactgctaggataattgcgtaataaatttaataacgttaatccttctggttccccagacgctgaaataatcgcagtacgtaaatcctcaatctctgaatcattttgaggagatttagctgtaattaatttagccaaacgttgcagcataaattccccttgctgggtgtggagaaattgtgacgcaactgccggagtaattttgacattactaagtaaaattttgcgtaattcttgcagtttatcagatgaaatatattgttgataaactgctaatttatcatcaattattcctgtttttgtataggtttctaaactcatcacaggaataggaatttccaggatagaataagcagcgtaaatttgctctgctgccatcacagaattactcattccaaatgttggcagcaacattgaaagcaccagcaataagaatttttttttccagctgctggaaaagttaccaaacaaactattcatcgctcaaatgtttccgtgatgttgtctagcgaggcgttaaatttggtagttattcaaacaccctgttgattaatttatatactattgattacatctgtgttctggatagttttgagcttttttttgtctgctgaaataaaaatttagctattcaatcattagagcaatttgtacctaaatggatgtggatctattgatttatatagatatatattgaaaattttagtaaataaaaaaaactcttgcctcagtgtttatgatgtagctttctagagtaaataaatctaaaccttgttaaaatttttgtaaaaattatgttttttgtattgcatgagactgcaaaatcagatatctttgtttttgagcagtaactcaacattaaaaaacctcagactcaaatcaccgacttcttcaagaagtcagggatctatccacagattattttacgtttaattatgttgatctatttagagaagaactatttgaaaaaacttcggaaattgtgaattttccagtaaattctattttgcagacttacccaaggcgatcgctactgaaccagaaacaactaataaagcgccaataattcctattaaggtaatattttctgggggaataagctggggaaaaatacccgctaccaactccacagctattaaagtgacaatgggagctaaagctaaaactgcactgactctggaagcttcccaatgttctaaagattcagcaaaagaaccataagcaattaaagtatttaaaccacaaaataataacattgataaatgcagaaaatcaagattaaaaattttattgactttggtaaatggcgtaaataataaagcacagccgccataaataattagcataatatgataagatgataaagattgtaatagttgcttttgtgccaaggcataaatagcccagcaaacagcacctaataccagtaatccactacctacaagatattgtccttgggctgtaattaaattgctaatttgagctttaaaaaataataaaaaccctaaagttaagacactaacaccaaaccattgccataatgtataacgttctctaaaaataactaaacccccaaaacctaataacacagtagataactgaataattacttctgcattactggcagttgttaatgctaaaccttgcatgaagagaaaataattacctcccaaaaatattgtcgctattgctaataattttcccgaactagaacgtaattgttcgattgttggtaattttttttgtacaaacaaataaattgccagcaatataaacgacatcaaaaaccgaaaccaaataacggtatagacatctaaaacttgtagtgttacctttaaggcaattggtaaaattccccataaaaacaccgtaagtaacgataaacttagtcctaaacgccagcggccggaagtttgatgtatcatattaatttcatgggattatttatcatatattttaggtttgggaatggggaataggaaaaaagtgattatgagtcattaacccgtgatgatatcattttgttaaaagaatacaaggggagcatcccaaatgtgtaaatttatttttatctaacgacataaaatgatccaagggtctgatatgattgaaccgcaaagggcgcaaaggacacaaaggtaagagagttaagcgagagtttttggtgtgggtgcgtttattttcgcaaaattggtggttttaattatgaagttttcatatagcaaccctaaatcaatcatgagaaaacaccgtagtcatgaagtttagggaagtcaaatatttgacagttgattgatagttcaaataactccttgatcacagtaaacgagtgacagaaaaaat

SEQ ID NO: 62 - DNA, 30774 bp, Sphaerospermopsis sp. LEGE 00249
  LEGE00249_78
ggactggggactggtgactggtgactggggactgggttaacctccctttcttcccctgcttcccctgcttcccctgcttcccctgctccctgctccctgctccctgctccctgcctcctgaactcctgtaatattgaatatggattttctgattgctacaaaaattccatgattcaattaagtccagcagctaccaatgagatggagcgattaaaatccaaacaacagccaaatatcttgtttcgcttgcaggtgaaaccaggtggctgttcgggttggttatacgatatttcctttgatgaagcggttaaagttgaagatcaggtttttgacgttaacaatattcaattagtcatagacaaagaaagcataaaatatattaacggtttgaccctggactattcagaggatcttatgggtggaggttttcgcttctacaaccctatagccatttctacctgtagctgtggtaattctttttctatttcataggtgattggtgactgggaataaatatgcttctttatcctgcctcctgactcctgactcctgactcctgactcctgactcctgactcctgactcctgactcctgactcctgactcctgactcctgcctcctgactcctgactcctgactcctgactcctgaactcctaaaaaataattgacgtaaaaaccaaaaaaacgctataatcaggatttgttaaaataaaacataagcagcttaacgcgctgtcactcatgccaacaatacagcagctaatccgtagtgaacgcgaactagcgcgtcaaaaaaccaagtctcctgctctgaaacaatgtcctcaacgtcgaggagtatgcaccagagtatatacgactacccctaaaaaaccaaactcagccctccgcaaagtagcaagggtcagattaacttctggatttgaagtcacagcttacattccaggtattggccataacttgcaagaacactctgttgtgatgattcgtggtggtcgggtaaaagacttaccaggcgtgagataccacattattcgtggaaccttagatacagccggagttaaagaccggaaacaaggacgttccaaatatggaactaagcgcccaaaagaagcgaaaaaataggaaataggcgattaatcgcatgaatatcgcatgaataacgattaatcgtctaatttcagcccccataaaacacagaatctagcggtgtattcttgtttaaaaaattaagctataacttgcactaagcgagcaagtgtaagagtttaaaagcagaatactgtaagcaatagcaacactttaatgtaaatattagagttgatagtgttgtcgccttctgtttctggtatagggtaaaaaaactaatgagttgagcttaaaagcaactaaggccaaaactcaaggaaatttaagcgattgcttacaccgcttttggatttctatgttctgataacatataatttcgttgccaaattccgaattcaaggatgaagtatgtctcgtcgtggtgttagtcaaaggcggcctgttccgcctgactcagtgtataatagtcgcctcgttagtatgatgatgcgacgggtaatgcgtcatggcaaaaaatctctcgctgccagaattgtttatgatgctttaaaaactattgaagaacggacaggcggcaatcctctggaaacatttgaaagagcagtccgcaacgccacacctttagtagaggtcaaagctcgaagagtaggtggtgcaacttatcaagtaccaatggaagtgcgttctgatcggggtactaccttagcactgcggtggttagtacaattttctaggtctaggccaggtcgtacgatggccagtagactagcaaatgagttaatggacgcagctaacgaaacaggcagttccattcgcaaacgtgaagaaactcaccgcatggctgaagccaacaaagcatttgcacactaccgttactaagtggagcaacgatatatcgcctaattgccagcggtatatcggcaactttctgcccaagacggttttccgtaaaagtatagaatcttaacaaagagtaatatacaagatatcatgagtcctaaattataggaggtaactgtggcacgcacaaacccgctagagaaagtacgcaatatcggtattgcggcgcatatagatgcgggaaaaacgacaacaacagagagaatattattttactctgggataattcataaaattggtgaagttcacgaaggaactgctgtaacagactggatggatcaggagcgggagcgaggaattaccattactgccgctgcgattagtaccagctggaaagatcatcaaattaacattattgacactcccggtcacgtggacttcacaattgaagttgaacgttccatgcgggtgttagatggtgtaatcgctgtcttttgttctgttggtggtgttcaacctcagtctgagacagtatggcggcaagctgaccgctacaaagtacctcgcattgccttcatcaacaagatggatcgcacaggagcgaacttttatagagttcatgagcaaatgcgcgatcgcctgcgggcaaatgccattgctattcaactgcccatcggtagcgaaagtgattttaaaggcatcattgacttggtgcggatgtgtgcatacatttacaccaacgaccaaggaaccgatattcaagaaacagaaattccggctgaactacaagaacaggtagcagaataccgcactaagttaatagaagcggtagcagaaactagtgatgatctgatgactaagtacttcgagggcgaagaacttacagaagaagaaatccgtacagccctacgtaaaggtacaattgagggaaaaattgtacccgtgctttgtggttcagcctttaaaaataaaggtgtgcagttgatgctggatgcagttgtagattacctgccagcaccaattgaagtaccaccaattcaaggcttattgccaaatggcgagacagtggagcgccgggcggatgacagcgaacctctagctgctctagcattcaagatcatggctgacccctacggtcgcctcacctttgtgcgtgtttattctggtgtattgaaaaaaggcagctacgtcctgaacgccagtaaagacaagaaagaacggatttcccgcctagtgctgatgaaagcagatgaacgacaagatgtcgaagaactgcgggcaggtgacttaggtgcagctttgggactaaaagacaccttgacaggtgacactttatgtgatgaaggatcaccagttattctggaatccctgttcattcctgaacctgtgatctccgtagcggttgaacccaaaaccaagaacgacatggataagctgtcaaaggcactacaatctttgtcagaagaagatcctaccttccgtgtcagtgttgatccagaaactaaccaaaccgtgattgcggggatgggagagttacacctggaaattctagtagaccggatgttacgggaattcaaggtagaagcgaatgttggtgcgccacaggtagcttaccgcgaaaccattcggaaaacagttaccaacgtagaaggcaaattcatccgtcaaagtggtggtaaaggtcaatacggtcacgttgtgatcaatttagaaccaggagacccaggcactggctttgaattcgtctctaaaattgtcggtggcgtagtacctaaagagtatataggccccgcagagcagggtatgaaagaaagctgcgaatctggtattttagctggatatccactaattgacgtgaaagcaacgttagttcacggctcctaccacgatgtagactcttcggaaatggctttcaaaattgccggttcaatggcgatgaaagaggcagtgctgaaagcttcaccagtcctcttagagcctatgatgaaagttgcagtagaagttcccgaagactttatgggaactgtcataggtgacttaatctcccgtagaggacagattgaaaaccaaatcactgaacagggaatcgctaaggtgacatccaaagttccactagcgactatgtttggttacgccacagatatccggtctaagacccaaggccgaggtatcttcacaatggaattcagtcactacgaagaagtccctcggagcgtggctgaaactatcattgccaaaagcaaagggaacgcttaattaaaaaaggaaacgagtatacatggcacgcgaaaagtttgaaagaaaaaaacctcacgttaatatcggtactgttggccacgttgaccacggcaaaactactttaacagcagccattaccatgaccttggcagctatgggtcaggctacagctaagggttacgaccaaattgacaacgcacccgaagaaaaagcacggggtattaccatcaacaccgctcacgttgagtatgaaaccgaatctcggcactatgctcacgtagactgccccggacacgctgactatgtgaaaaacatgatcacaggtgcggcacaaatggacggtggtatccttgtagtggctgctactgatggtcctatgccccaaactcgtgaacacatcctgttggcaaaacaagtaggtgttcccagcttggttgtcttcttgaacaaagaagatttgatggatgacccagaacttctggaattagtagaactggaactgcgggaactacttactagctatgatttccccggtgatgacatccccattatcaaaggttctggtctacaagctttggaagcaatgactaagaatcctaaactccaaaaaggagaaaatccctgggtagataaaatctacgaattgatggatgctgtagattcctacatccccactcctgagcgtgatgttgataaacccttcttgatggcagtagaagacgtattcaccatcacaggtcgtggtacagtggctactggccggattgaacgtggtaaagttaaggttggcgatacagttgagctaattggactcaaagatacccggagtacggctgtaaccggtatcgagatgttcaagaagagtctcgaagaaggtatggctggagataacgctggtgtattgctacgtggtctcaaaaaagaagatattgaacgcggtatggtaatcgctaaacctggttcaattacacctcacactcaatttgaaggtgaagtttacgtattgactgagaaagaaggtggtcggaaaacaccatttttcgcaggttatcgtcctcagttctatgtacggacaactgatgtaactggtactattcaaagctacacatctgatgatggtagcgccgtagaaatggtaatgccaggcgatcgcatcaaaatgacagtggaactgatcaacgcgatcgcgattgagcaaggtatgcgctttgcgattcgtgaaggtggccggactattggtgctggtgtcgtttctaaaatcatcaagtagtacctttttgtctttgtaattaagagcagagattggaaaagtacgtctctgctcttttatcttccctttagcaattttggattttaatttatgattcttgtttgtttctcaaatctaaaatctaaaatctaaaatctaaaatctaaaatctaaaatctaaaattcacagaacctggaaaactaaagatggcaactttacagcagcagaagattagaattcgcttacaggcttttgaccgacgtttattggatacatcttgcgagaagattgtagatacagctaaccgtactaacgctacagctatcggaccgattcctttacccacaaaacggaagatatattgcgtgctgcgctcacctcacgtagataaagattcccgtgagcattttgaaacccgcacccatcgtcggattattgatatttaccagccttcttctaaaactattgatgcgctgatgaagttggatttaccatctggtgtagatatcgaagtcaaactttaattagaacaggaaatagagaatagaaaatagggaatagggaatagggaagagagatcaatattagtcttctttttccttttgcctgttgccttttcccactgataatcgaaaatctacatggaatatttttaggtatgaatattaacccagccctaagagaaattttcttagggtttttcaatagctatccaacaaatgataaaatataaacaaagtacggcgacagtaaaagtaaaaaaatatattttcagaataaataagaataaacttgatacccacctaacaatgacatcttcttcaaaaattgccgtccgtgaactacctctgttcccgttacccgaagtggtgctgtttcccaccagaccattacccctacatatatttgaatttcgctaccgaatcatgatgaacacgattttggagggcgatcgcagatttggagttgtgatggtcgatcccatccaaggtactattgctaatgtcggttgctgtgcggaaattattcattaccagcgattaccagacgaccggatggaaatgttaactttgggacagcaaaggtttcgagttttagagtatgttcgtgaaaagccctatcgtgttggtttagtagaatggattgaagaccatcccccgtctcaggacttgcgacctttagctgctgatgtagaacagctactgcgggatgttgtccgtctttcagctaaattaactgaaaaagatatcgaactgccagaagatttacctgatttaccaacagagctatcttactgggtggcaagtaacctttatggtgtagctcctgaacagcaagcattgttagaactacaagacacatctgctcgtttgcaaagagaagcagaaattttgacttctactcgcaatcatctggcagcacgttctgttcttaaagacacttttagtaatatgggttaatcatcaactattgtgttttgccggtaatgggtaatgggtaattggtaagtagggcttgctgagaaagtctttccgtgagggcataggagtcaggagtcaggagtcaggaggagatttgaaaatttctttgccatctcttgaaatcccaaaaaatgcacactttttccggtatacccttccaaacccttgcactaatttctgtgtttatcagcctctaacctttgatatatcaaggttttaggtttattcagcaaaccctacttaaacatcaattaccagctaagctataaattattagcagaaaatgatattaatcggtaactgtcaagacactataactaccaaaaatttttagcacttccgtagaactgtttaattctgctaaagctgaagtcattaatggtgaactgactgccgcctctgcatcaatgaaaaataaatattctcccaaggaacgcttagtaggacgagattcaatccgactgagattgattcctagatgggcaaatacttctaaagctttaactaatgcaccaggaagatttgcaggtacactaaaagctaaggatgtgtgagtaggattgaaaccattatttttcgtactgtctttagccactacccaaaagcgtgtacagttgtcaggatagtcgttaattccactagcgagaataggtaaattataaagttgggcggctctctgagaagaaattgctgctgtttccggtgcttgcggtagtccttgtagtgcttcagtagtagaatttctggcgattaaattggcattgggcagaaatttggccaaccaactttgacattgtgctaatgcttgaggatgggaataaactgttttaatattttctaagttattagcacaggaaattaacgcatgattgattggtagaactaaagccagttttattcgcaagctgtctaactgccacaggctatccattgtcatgctgacgctgccttcaatggaattttctacaggtacaacagctatatcagcttgttctgtagctaccgcttgtaatgatttggcaatagtaggataaggtgataaggtagcttctatctcttgattgctttttagccaattgagataaaaagaagcagcttgttctgagtaagttcctggtggtcctaaatatgcgatcgccgcaggttcacattttttcatgacaattttagattttagattgtagattgtagattttagatttgtaattagggtttgctgaataaacctaaaaccttgatatatcaaaggttagaggctgataaacacagaaattagtgcaagggtttggaagggtataccggaaaaagtgtgcattttttgggatttcaagagatggcaaagaaattttcaaatctcctcctgactcctgactcctgactcctgactcctatgccctcacggaaagactttctcagcaacccctaattagattacaggaagcaaggaaaaaatttttcttctctgtatcctgattcctgtacaggtttagcagtgctaaacccctaccttctgccttcttttaagtgattatgaataaatttattgattttatgcaaaccaatatagtttattaaaaaatattacaataaaacatattgctttaatctactcatggctaccaagtttactgcctctcaatcggtcgaaattcttgtccccaagcaacctatccctattcagcactacttgcgtcagcctcaacgtctagtgagaaccttagctgacaatagtaggattcagcagttatctgaggaagtgttttgcttgaaaatgcgtcctctggcttttatgtctttaactattcaacctactgtagatatgagagtttgggcggatgcccacggaacaatttatttacgttctgtagggtgtgaaatcagaggttttgagtatattaaccagcgttttgctctcaatttaaaagggtatttatcaccttaccacaatggtaatgacacaaggctacaaggaaaagccgatctagaagtgttggtagatattcctcacccattttccctcactcccaagtcgattttggaaaccacagggaacggtttacttaaaagcgtgttgttgaccattaaacaaagattattacatcacctcctcgctgattatcgccattgggtaatatcacaaacacaaataaaagaaattgctagtgataatacagaaatgggattgttaaattttgaatgattggtggttggtgactggggactggggactggggactggtgactggtgactgggtaatcaattttatgttttttaatcagctattaccaattaccaattaccaattaccaattaccaattaccaattaccaattaccaattaccaatcacctgagttgacatggacgaaaagagagacgatgtaagggtgatggaccgtatttttgcaaagccagcaaatgtcgcgggctgccataacccttattgttttctatttcatacattggatacttagatgccaaacgcaaaactaaatcatcacgccaaactttagccataatactagcagctgcaatgttgagcgatcgcccatctccattgacaatagtttgttgcggtatattcaaatcctttaccatctgattaccatcaactaagcaaattgcgggctgtacctttagcttcagtatagcccgcttcattgctaacagtgttgcttgcaaaatattgagcttgtcaatttccgcagtagcagcataaccaattttccagtctaaagccagttcagcaatttgctgtgctaactgagttctacgagaactagacaactttttactgtcgttaattttcaaagccatcagttgtggcaaagctactggcggtaatatcactgcggccgcaactacaggaccaaataacgcaccacgccccacttcatccacaccagcaaccaacccatgaatatctaaacctatggaaaattcccaccaacttgattcgcccaaaggtgtagttgacgaaacagatgcaggtgttggctgtgtctctaccataaaagcggttaactttcctccagtgcggaagaacgacggcgacgacggcgattaggaatagaagtgctattgatgatttcctcatcatctgtcaaagagtcaaatcctgtagatttagaatcttccagaggcggctcaattctggattttggcaaggatggttcttctacctcaacttttggtgttggtattttgactctggtaaattcagatgtagttgtttcgggaaatatggattctgaggtagattccgttgcgctatttggtgtttgtccaggttgaacaatgttaaaaatcacagatttgggatttttaacctctgactctaacttcacagccggagaaatgcccatttcagcatacatcttttgttcctggtctgtcatttccacggaaacaatctggggcggttctacaactggtttaaccggctctatcttcactttagtgcgctctggtctttcccaaccacctttaccaagagtaggggttcgcatagcttctctttcccggagaggatctgagagaagagaggcaatttccgatgtgggggttagctcattgtcgctatccaagtctaaatctaaatcattgccaaatcccaatgaattaccagacctgacttcatctttgccattagtgccattgataccgatgcgactgcgacgggtgcgggtacgacgtttgttgtcacccaattcttgataactgggatggttgatcaaatggccaacctcagaatcactttcaaaaccctcgctaaagccatcataaatgtccctagtttccctggtttctgggatgcgcgcagatggtgttctcacttctctttggggtatcggtgtcaaccgatctggtatgtctgctgcggggatgggcatccggttttctatttcccctggtaaacgtacagtatgtcctaaaccgccacaggtggggcaagtttcgccaaacaattcataaatattttgaccttggcgtttgcgggtaagttctactaaacctaactcggtcagttgggcaatttgcggacgagctttgtctgctttaagggttttattaaagtgttctaaaacttgcagttggtcgcgtcgtgattccatatcaatgaaatcaactacaatcacaccagcaatattcctgagtctgagttgacgggcaatttctgtcgccgcttcgcagttagtccacagaacggtttctctagctgtggcggaacgggtgaaagaaccagagttaacgtcaattactgttaatgcttccgtgggttcaataataatgtaaccaccagaaggtaaatctactcttgggcgtaaagcttcacgaatagcagcattaatgcggaagtattctaagatgggtgagcgatcgcggtgatgatcaattaatacaccttgtggtgtttgaccgccactccagttttgtaaatactgtttaactcgtcgtaacccagtgctggaatcaactacaatccgattcacatctgcaccgtacatatcccgcaatacacgctggataaagtcatcatctcggttgagcaaagcaggagcgcgggtagagactgcttcctgctgaatgacttcccattgtctttgtagcaattctaagtcttcaattattgcctcctctggtttgccttcggcttctgttcgcaccagcacacccatacccgcaggtttaattaaaattgccagggcgcggaggcggttacgctcactttcacttttaattcgccgggatagattcacacctctaccatagggcattaatactacataacgtcctggaagggtaatgttacctgtaagccttggtccttttgttcccgttggctctttcatcacctgcaccaatactttttgctgtggtgtcagcagttcagtaatggctgcggaactacgttttattttcaacggtcccaagtcagtaacatgaataaaaccgttgcgttctggatcgccgatattgacgaaagctgcgtctataccaggtaatacattttctactacgcctaagtatatatcaccaatttgatgatgaccagtggcaacaacgagttcttgtatttgatcttccgaaaatacggcagcaatttgatgctgctctgcgataataatttgttttggcattcaagttcctcaaaaattggcagcaccaatggggattacaaggagcttattttatacctctagccccctactggtagccctacaaggcgctactggtaataaaaatttctttctctgacatagcttcccataattgaaagctgttaacaatactgtaattgcgtttacacgcctgattattccagaaccgttgcatgagttttcagtaattacatcaaccgtctatggttgatgatttctgaaccactacctctaccatctggggttttggtattggtacaggtgttgtaaaaagcatagagttagagactaggcgtaaagctattgttagtcactgattcactaggtagctatagagagagtgtattttcacctgccttagttgtttcggatacaatcctagaaactacactctcattatttttgcttgcactccctgatgatcagggtagtgaatcagattattcaacgcagcgccagaaaatttctcttcactttattctagcgcaaccttgctaaaaatcaattcctatgaatatgcttattccgggtaactactagcaagttacccttgaggaattatgtttctaaaactagccgattgcggtggatatgcaagagatgaaattctgcaccagccactatttctagtatagacaatatttgctcaggacgcaagatcacaccgtcatgacgacagctacccaaataacgcaagatagcttgagactcggctggagatgtgttcacctgcactaaatctatttcaaacaagcgatcgcgtagatttatgctttgctgtttacctgatttagttgtatgttctgacaaaatctcatcttgatccagtatagccacaatccaatcttgccatttgtcagcttccacatttccgggtgtagaaatagtgagcaaatattccgctgctttcatagcttggttagctgcgggtgctttcaaatctatttcttctattctgtagatggggatatctgacggtagttgacttaccagttgggtgcgaaaatcttccacatccatcggttgagtgagttcaaaatcaactatttccccactgctggtacttcccaaggataaagcactagctaaagcaatacggggatggggatgaaaaccaccagtaaaagctactggtaaacctgcccttcgcatcactctatcaaacaggcgcattaaatccaagtgactgactaaagccatatcaccttgttttccaaaccaaacccttaaccgttgtgctttggtggtattggggacaaaatcaccgacaaactgaggaattgcaggtggttctataacaatattatgaccgaaatcagtgccacagacaccacaatgggaacaaccttcaaaagagcagtcaggaacaacagcagcttctagagcgcgttttaagtcctcttgcagccactttttatcaatcccggtatcaatatgatcccaaggtaagggcagatccagaggtgaagaaggtgacaggtgagccagcgcggtcttgggggtttcccccataagcgactggcgaactccgaaggggtgacaggtgacaggtgacagtttttcttgttcttcgttacctaaagaaaacagattccattccccattctccacctgacgatatttccaatctagtccagcttcggaaattgcttctccccaagccttgaaagctgtttctacactgtcataccaagagtccattcctgcaccgagttgccaagcacgaaggaggacttttcctaaagagcgatcgcccctgcctataaagtcttccatcgcagaaaggcgaatatccgtaaaattcacctttacattacgaatacgccgaaattcttgtcttaataaatcttgcttgcgggcaaactcggcagtagaaacggaatgccattgaaacggtgtgtggggtttgggcgtaaaattggaaattgtcaggttaaaactgatcggtctcctaccttgaccccgacattctcgctgtaaccatctgactgtttccactattcccaaaacgtccgcgtctgtttcccctggtaaaccaatcataaaatacagcttgattttatcccaaccttgttcccaagctgtttttactcctcgtaataattcttcgttggttaaacctttattgacaatatcccgcatccgttgagtaccggcttcaggcgcaaaagtcaagcttccttgtcttgtacctcctaaaatattagcgatattctcatcaaatctatccacccgttgagaaggtaaggacagggtaatattttcattttttaagcggtttttgatttccatccccactgcgggtaaggatagataatcagaacaactcaaagataatagggaaaattcattgtaaccggttgcccgcattcctgcttcgatcgcctctaccactttttctggttctacatctcttgcaggacgggttaacattcctggttgacaaaaccgacaaccacgggtacaaccccttctaatttctatggttaggcgatcgtgtaccgtttctacataaggtactaaaccaatagaataagcgggaataggtgtagcaactcttctaatgatccgctcaggaacatcaggacgcaaaggtttaaccgcgccattttcccccatttcataaaattgtggcacgtaaacaccgggaatctgtgccaagtctaataataattcttcccgacttaaacctgcggcttttccttcagcgatcactaaacccatttctggtaacagttcctcaccatcacccaaagcaataaaatcaaaaaaatccgcgtaaggttcagggttagatgtggcagtttgtccacctgcgaaaattaatggatattggtgactggtgactggtgactgggaagaagaaccttctgaactcctttctttccaagtcaggggtattcctgctaaatctaacatttccaggatgttggttgcccctagttcataactgaggctaaaacccagaatatcaaactctgttaatgcccgttttgactctactgcaaacaggggtatttggttgttgcgaagttttgcgcccaagtctggtgctgggagataagcgcgatcgcacaactgatttggttggacattcaaaatgttatacaggatgatatgccccaaattagaagcaccgacttcataaacttctgggtaggttaacacccaacgtacagttgccgcattccaaggtttatgtactgctaaacgctcattacccaggtaacgggcaggttttaaaatatccgatgttattaattgctctactaaaacagccactttgctatcttttagctaacttaaattacaacttatctctctcaacttagcatttattctgtctttcaggtcaattgttcacagtaaattagaactatattatgtagatcaacataattaaacctatttccgatctgaattaatcattcatctgtgtaattcttaatcctcaatcctgacttctgactcctgactcctgattcctttattaaatctttattgctttattgctttgtgacttttgtttaaagattgttataactacaaggcaaaatgtatatataaatacatttttttcctttgggttaaaaaacaatctacatagacagccaaaatgcagattaatcttctgtcgtcatgatactaaacctgggaatagctatcactctgtggatttaagccaaaattaccgtttgcttgtgatctagatcactaatttatagatagctagatcactttttataccgataccaatcttggataatgggtaacaattaaaggtgagtgattttttatgaacacacaatatgccattcgtcaactggtagagaaagcgttgcacatcaaaaaattaacgccagaaatcgaaaatgaaattaactcagaactgactcaattaggttatatatctgacgtggactacgaagctctagaattgttaatggcagagatggacgctggacgagtgcagttagttccacgctggggctagtaactgttagtttttctgaataaattcacaattcttgagcatcttggcacgcttgccaaagctggtggataaactgatttagttgctgttgggcaaccgtatctgtgtcagcttttggttcttttggtaaaagttgactcagtagactaatcacttctgtatctaaagcagtccgaaataatttgacaggccataacaagtcagacgcatctcgcagatcagttatcaggggtagttcgtgggtgaagttagccagtagtaaaggacgcacccagcataaatcacgatcagtcacaacttgaatgacttcagcataaaggtttctgttgccataatctaaagacactatttgtcctggttgaaagttggggctaatatccatagcagcagaagatgaggcaaaaactttgtagtatttttcttcattttaaaagtaatattgctgtagtattatgattataattggaattttttaattctaattaccagttataaccacacagtgagaatttttctagctggaatcacaacaaaaatgttatattgtaaataaataaatgttaagctgatgtttaacaaaaataatattgtagtaaattcacgatcaaagagcaaagagcagtgtcagtagaaactattcaaaagccttccacaactcgcaagctcgcgcctcggtatcgcgttctactccataacgatgacttcaactctatggagtatgtagttcaagtgctaatgaccacagtgccgagtattacccagccccaagctgttagtatcatgatggaagctcacaacaacggattagctttagtaatcacctgcgctttagaacacgctgaattttattgtgagactttaaaaaatcatggtttgagcagtaccattgaaccagatgaatagttattggtcattagttattagtcactggtcattagttaattagtagtatattgttgactgatgatatttgactaattcatgaaaaaaattaatctatctcgaatttcccaaagtcccgcccctgttagggtgggttgttttatcttgtgtttattggttttatggttgccttttgcagcacctatatatttactggttgaagatactaatttagaaagtagcttgacaatcgtactactttatgcagagtttatttttctactgaagttatggggtaagaaagtttatcaacaacctcagatattaaaacattatgggttagaattttcccgcctcaatggcatagattttgttcagggtttaagtataggattaattagtattttaatagtatttagtttacagggttggttgggttggttattgtggcaacaaccaaaagtatttttagtcaaaataattttagaaggtttactggttggtttcggtgttggttttgcggaagaattattatttcgtggttggttatgggatgagttagagcgagattacaatttaaatttagcagcttggataaatgccattttatttgccgttgcccattttattaaaccattagaagcaatcattcatactttaccacaatttccggctttagtattattagggttaacgcaagtatggggaaagcttggtaaaagagggcgtttaggtttaccgattggtttacatggtggtttggtttggggttattatattattaacgtgggagaattaacaaaatattcgggagttgttcctgactgggtgactggtgtaaataataatcctttacagggaataatgggggtattatttatgggtggactagctttgtggatgaagaagaattgatagttgataattgatagttgataattgatagttgataatttaataatgattaaatatttttggatgctgctggttttcatttttgcttgttctttttcttttacatctcccgctttagcaacagtatgtaggaattatcaagggcaagaaatttgtattttgagtattaaacgcagtgctaaaaaatattgggaatatcgagcatctgtaagtattaatggtaaaaaaacaccaatggaagtttataactgtcggggtaaatttaaggtaaataaagatggaaatgtgacgctattcaaagataatagtcctggggaaatgatttgtagtttttttaataaatgatagcgtattttcttaataaatgtgggggcaagacttgtactgagcggttagtgagcttgtactgagcgacctgtactgagcctgtcctgagcggtgtcgaagggcgcagtcgaagtaagtcgaagtgcggagtcgaactatgtcgaagtatgcctaccccacaatagttgtagcttagtttttagtgtatttatcaataacttgagctaaactaggtacagcgtcttccacattttttttgactgaactgcggagtttattataaacacctttgatagtagagttactgcttttctgaatccgaatatcagtaatactcagcaataaatctgctgtacgagaacgattttgactaagatatccgacagcatcacctgtatttaaaccttcttcccagataggttctagtgcagcgaaagattctggtaaaagacgctcaattgcaccagcacagtatcctggactaattcctttaataactgcatatccagttttgatcgccatcccagaaataccacttgtagcagcaacttgagtatctaataaatttgtcaaatcaactaaaagtgtctgtcttttattatcatcagcaagaccatcaatcagcgccattgttattttccttagtaccaatgtgttgagtttatatttcaggtagtttatcccgtaattaggaaactagggactgatttattatttattttgtgccgtaaaaattcgccaaataataaataacgtaaatcctaaataggcaaatactgtgagccattcttgaaggcgactaaatgaatcattcataatatataagaaaatatcttttttgactagtcattggtgagttagagttgaagtttacctgaaattaaattcataaccaactcaattattcaggagaattttccaggattgtacccaccaaacaagcctgaactagattgacaccgattaaatttgcagcttctaattctgcacaaagtaaatttgccccggttaaatttgcccctgctaagttagctccccgtaaatcggcttcttccagattggcttgacttaatgttgccccttgtaaatcagcgcgagtcaaatctgcacttttgagatttgctcctgtgaggtttgcaccacgtaagtcagcactacgtaagtcaacaccttgtaagtttacactcatcaaattagcaccacttaaaaaagcaccggctaaagaagcatcattaagtgtagcacccattaagttagcaccacgcaagttgctgcctcgcagatcggcgctggttaagtctgcttgcattaagttagctcccattaagttagcccgcaaatcagtttctagcaagcttgcacccattaaatttgcaccttcaaaatgtgcgccttcgagtttagaacctgtaaagttagtaccaacgagggtggaaccggctaagttaatgcggcttaaatcgagttgggacagatcctcgtcttctaagtctactccgggaaggtgtttaatttttcctaatctaatggtttctatgttcatgggtgaatttttagtttttaatttttagtttttagtttttaatttttagtttttaatttttaatttttaattcttgactgttccagcgagaatcaatcaaccacatactactactaaatttgggtgacatgatgggtaagtcaagtccctgttgtaaacccataactaacaaagatagggtatctatgagtttagggtcaaaacgggtagattgttggtgtcgacattgttctagggcattagcaaagatattttgtccactttgatctgagtatttttgctgactgactcgccattgaaagtctgctgctattgctaatattcttgattctaaaggaatttcttcacctgttaaacctgctggttctcctgtgccattccaccattcggtttgatgggtaataatttgggcgatcgctctgagttggggcattgtccgtaatacttgcgctcctggaactaggggacaacttggtcctgctacttgttctgtgggcttgttgggggatgtgaggatgctttcggtttgttgcagtggatcgattcggtgtagtaacccagctagacgtaatcttttaatttgccatgcgggtaggtctagtaattgtccgatgatttcggcgatcgcagctacttcggcggcggccatgggattttgaatatctgctatgtctattaattgtgccatccgcaaaaatgcctggacttcgttagaaaccaagttggaactcaaagtgttttggcgtgtggctgtaggataggataaagtattttcaccactttttaggtagtcaatgaccagggaaacgactttcccaatctcctctggtgaagctatttctgccttgattgcttgtttatgctgggtcagtttttgggctagttctgggttgtatttttcgatgtgggcgatcgctatctcggcggctttcagaactacatccggctcaaatgtccacattccatagaatttgcgctctaaatctgaccccggtagtcctgtaactccataatcttcatctgataattcttgacaaattaccattgatgtgtattgtggagacagaatcattaagtgccattcttgggatactggatcagatgtttgtagtggtactaaatctacatttgctagttgactggtgggatgttcagcaaaaccggcatcactggtagccataattgcaatttcccggctgcacttggcaatatctgcatatctttgggcttcttgcagataccatttgcctctttgaaagcaggtaattactattggttgatcttctttacttaaaatatggtcttctaaagcatgacataaagccactaaggtatttttataatacacgccaaagcgaataggtctattgctatgacgataggctgtttctaattgttggagaattgaaccttgtaacatggaattttggtgattggtgattggtgattggtgattggggattggtgactagggattggtgactggtagttggtaagaataaactcttgccttttgcctcttgccttcttactgtcacctgtcacctgtcacctgtcacctgtcaccgcatacacactcagtttacactagccaattgtttctcagttttttccacaattggggctgtcagtgctgtttccaactcagcgcaacctaatcttgcttctaagattttcattacttccctaccgaagtcgttggggttttgtcgccaagcttgtaaacagacttctccgaaaaatgatcctaatggttctggattccaaagtagttttttggcagtccagggcatcaaactcataggattataccctggtttgaggataccttctttaaaagcatattcttccaggtgggtatggggttgcagtccaatgaagaaaatagcaggttcaactttatccgcgccaaaaatccgttctagttctcgatgataggctatagtttggcggatggtttcgggacgctcatcaatgacgttaaatgagtaattgacggaaaccatatcattaaaacctgctgctttcaagtcacggcagttttgcagtacagtccgcaggttgtaacccatccgcattttccgtaccagttcttgagaaccgctagtaatgccgatttcaaaataattcatcccggttttggccatcaactcacacagttctggtgttaagttgtctgctctaatataggccgcccagttaatatctgtcatgccagaatcaacaattttttgcaatagctctatggcatcatcaatatatctgcgggcggggataaattgagcatcggtaaaccagaagttacggacaccgcgattatatagttggcggatctcggctacaacttcatcggcgggattaatgcgtacctgcttaccttcaactactgtgtacacacaataacagcagttatggggacaaccgcgcttggtttgtacaccaatatagaaatctttatcttgcaggtagtagttaatttctggccagatggtttctatgtagtcgtagttacaagcggttttttctaggggtgtgggttgttcatggatcaggcgttgacggggttggttttctcccactacataacaacgttcatcccgaaattcttggacactgaggtattttgtaagtagggtttccccttcacctatggaaattattgttcctgaaggtaggctttttcctaactgttcataaaatacgctgactgcaccaccaccaacaactgcacgggcttggttatgatatctttgggcgcgttttaaaccgcgtttgattaatcccaagttgcgccatagttctacatagtaggcgatgaagatccgcaacccgcctaatgcaccccgtaatttaatgaatgggtttttggcatagtaaaattcaaaggcgttttgtagggggttgccgcctctacctcccactggtgcatagatttgaatatctcgccaagaaaagactaggagtgtgggtttaaattcgtcaatacagcgatctagggcgctgctgtagtccaggggtggtactgttcctaaatcaaatattttttgttcgatgttagggaatagtttgtggacgtgatcgctcaggtaaacaaccccaatgggaaagatggggttacaaggaaggcgaacgtaaaggattcgattttccatcatggttgtttcaactgccatcttgccaatttgtaggggaaaactagagaaatatctggtctaaacctgtgggtttgtggtgttaatcttaatttaccaatattttgcttgacatttgagccagtttttgatattggcaaatttactttcaggaaaagtgagaaaaggtaaaattgctggtcatcaaaatcattgatggttagcaatagataaagtttatgaagaaaatttcatatatctttaccataacattgatctctacccagatttggtaacaagtttaggcaaggttgctcattgaaacaagaatcccgatccttttaaggcggggagcgtcaatgattcagtgatgattgtcgcctgcaaattagcagatgtaaatcagtagatcgataaaattgaaaaaccaacttctcagcaagcctggggttagtagccttgtctgacagctttcagggttattaagttcacagagggggaacagcaaaactaaagaaatttagttgaaaatgtataataatgcaaaaattaagatatatttaccgatttttttccaaaaaaacatgactttagatagaaatgatgcagaaaatttcagttggtagtcgcagttacagcaaatggggatcatccgatgttagttttggttgtgtaatgtaaaattgtggcgtaaaagctcctcagcagttatggctcaaatattagattctctaccaccggagcaatcggggaaaattctctgctgctacgtcaatgctacaagtaaaatacaggtggcgcgtatttccaatgttgctaactggtactttgaaagggtggtgtttcctggacaaaggctagtttttgaagcgccgaaaaaagcgcaaatggagattcatacaggaatgatggcgagtgcgattttgtcggatacaataccgtgcgatcgcctagcactgaatgaacctagtagtgatgagggtgatgaagactcagccccaggaatagaagctgcaaacaccaatgcgatggtgtcggaaatgaatacaaaaattgaagataccacaaaacctttacaaaatatcacagcctccatgaaaacctatcagtcacaacatgagtttttactgaatctgggagtgtgacagatgggaaggttggttaatgtcaaaagttttaaaaatccctggattaatatcctttgattaaaaaaaagcacgtttattaaatttgagggttgctgaaatcagcagccttttttattttattggagaattgggaattgggaatagggaataagttaagaattttaccgtaagcattcagccgttcacaaatgcaccgagtgtacacttcctcgtcaatctgtggtattttatattgaggaggcaggatttatttattttggattttgaattttggattgttcgtgtcaactccaatctcataaaaatttcttccccatctccatatcttcctgttccctgttttttgacttttaatttttgactatgaacttaccttcttttttatggttgtggaaaatagcagcttggtctatgggtttagcgattctagcttatgttattttagcaatgtctggtttttggttatggcaagttagaaatactggacgttctcccattggtgtggttttaccacgggtgaataatatagtcaaaaactttcattattttattggtgtgactatggtaagtttggtattattattgttatttattggtattatggggactttaggacattttggttctttgggtcattcttcacatttattcgctggtttatctgtggtaattttggttttaatttctgcttttagtgcaactcaaattagtacaggtcaattttgggctagacctttacatattactttgaatatgattcttttctttggttttacttgggtttctttgactggttggactgttgtacaaaagtatttaccatgacaataaaaaattatgctaggcttgatatgattgaaccgcaaaggacgcaaaggacacaaaggtaagagttttacagagagtttttcgggaggctatgtttatttttatattcttttggttttgaggatttttgatttttaatttttagtttctatgcgattaatattagttgaagatgaaaaagatttaggttttatcgtggctgatcgttctcgaaatactgggggttcgggtttgggtttagctattgctttggtcattacccaaactcataaaggtaaattagaagtagaaagtcaggttgatcatggttctacttttacgctgtctttaccactcgtttccacagtaaacaagtaatttctactatcattgatgtgatcatagctatagctgcggctattgctccattcattcctttattaatagctaaactggcaattattaataaagttcctgttgctaaccatgtggatagattaacatgacctgtacgattttcactgactaaaaagccttgtgtggcattttgcaaagctacaaataatggcacaatggcacatattaaaagtacaggtttgatgctatttgcaagggtaagatcattaccgataaaactttgaactatgcgatcgcctatgggtgttacactcatcaataataataatgtcgaacaaactgcacccacgctaatagcaaaagtcaaaagttggcgatcgctcacttgatggcgatatttaattaccatttgttgtaccatgcgggtagaattagcaattactaacaccaaaccccacgcagcagaccaaccagcaatagcaattgtagcatcttgagcgcgggcaagaatactaattaatatcgctctccctccccaaactaccatcattgtatttgctagggggaaataaaatttccatacctgggctaagttttggggtaaaccaggtttggtttctgtttctgggggtatcgttgctccactgcgataagcaaaaaatgttacagctacagcttcaactatcaccccactaatgagagctattcctgctaaaatacccccagatagttgtattaaaaaaccaattcctagaactaaagccaatgttaaaagcctgaaaatactagctatagctaacgcacggggtttaccgtggtaaattaataaaccttgaaaataacgccgccatgcgatcgcaaacggccaaccacaagctattaataatacttgactgactgtagccaacattgccaaaggaatacccaacaaactcgcaccaacagaattaaatatgataggtattcccaacaaacctaataaaaaactgagtcctacaccagcaaacaaagtaaaacgccataatgctgccctagatttttgtgatccagccaaagcattagcagcgtgaaggatcataataataggactttcaaaaaagattgccaaagacttagccgcacctacagccgctatattaacctgagcatcaggaagataagctaaagtagtagtcatcatcggatcaccacaggccatagtcacatcactcagggataaaggcaaaaattcccgccataaactccctaaacttatatttttagatgtatattcttctaacttcattttttactctttgcgtctttgcgtctttgcgtgaggaaaaatatttaaattttaaaactaacctgcgatttaacaagatccaaaggtacaggataaagctgagaaatagctattaccagatcgtcactttgtaaaatgtgaatattttgtgcagttaaccaatcggtattgtaaactgtttctagatagcgatcgccccgatcaggatttagtaacaacatagtttgaggcttgttaaatctttgagtatcagctcaagctgcggcaacaatagcaccagtagaagcacctaaaagcataccctcatatttagccaaagcatgacagacagaaaaagccaaagcatcattgacgctataagcagcgtctaacacctgggggtcaaaattggggggaacgaaggataaacccagtccagtcatcttataggggtgtctgggagtaccaaaaatagccgatccagcgacatcaacaccaataattcgagtttggggataatatgttttaaagtagcgactaataccccctaattgaccggctgtactcacacctataactatagcatcaggcgcacctccaaaagcgtcaacaatttccctcgcagtccaaatttcatgagcatcagtattaagaggatttttatgttgacatggataccaagcgccaggtatatttgcggctaattcctgagcttttgtcattctcgctacctgcattgaaccttgagcatcggcagcatttaaaggaacttcaacgagttctgcaccataagcagtaagcattcgccgcatagttacaggtgtttttgcatcaataacaatcatcacccgataacctttagttgcaccaacaatagctaaaccaataccaaagttaccagaactagattcaacaattgtaccaccgggacgcagtaaaccttgtctttctgcttcgtgaaccaggtaagcggcgtttttttctttaatacttccaccaggattacaagattctagttttaaatatagatgatgatgttgacaatgaggatggattttatttaaccgcacaatgggaactttacccaatgcttcggtaacgtttgcaaacagcaaggatgatggtaaactgttttttagggttgggttttgagagtaggtaagcatttcaggagttaaatactgttcaactcttaaaatgacaaccttatatgaaatgaagatgaaatttataattgataattgacaattgataattgataatgggtaaggggtgatttaataaaaaactgatgaaattctgaacttctgaaattacaaacttcccaaaaatcgaatttctcgaaaaatcgaatttctcaaaattgcaacttccaaaaatcaaacttctgaaaatcaaactttccgaaaaatcccaacttcccaaaaaccgaacttctgaaaatcccaacttcccaaaatctgaacttttccaaaatcaaacttccgaaaatctgaacttcccaaaaatcaaactttccgaaaaatcccaacttcccaaaatctgaacttctgaaaatcccaacttcccaaaaactgcaccttcaaaaaatcgaacctcccaaaaaccgaacttctgaaaaactgcaccttgcaaaaatcccaacttcccaaaaaccgaacttttccaaaattaaacttctgaaaatctgaacttctgaaaaattacaacttcccaaaaaccgaacttctgaaaatcaaactttccgaaaaatcccaacttcccaaaaactgcaccttcaaaaaatcgaacctcccaaaaaccgaacttctgaaaaactgcaccttgcaaaaatcccaacttcccaaaatctgaactttccaaaaatcaaacttctgaaaaatctgaacttcccaaaaaccgaacttttccaaaatctgaacttctgaaaatcccaacttcccaaaatctgaacttcccaaaaatcaaacttctgaaaatctgaacttctgaaaatctgaacttctgaaaaatctgaacttcccaaaaaccgaacttttccaaaatcaaacttctgaaaatctgaacttctgaaaatctgaacttctgaaaaatctgaacttcccaaaaaccgaacttttccaaaatcaaacttccgaaaatctgaactttcccaaaatcaaacttctgaaaaatctgaacttcccaaaaaccgaacttttccaaaatcaaacttccgaaaatctgaacttctgaaaaattacaacttcccaaaaatcgaacttccgaaaaatcgaactttcccaaaatcaaacttctgaaaatctgaacttctgaaaaattacaacttcccaaaaatcaaacttctgaaaatctgaactttcccaaaatcaaacttctgaaaaatctgaacttcccaaaaaccgaacttttccaaaatcaaacttccgaaaatctgaacttctgaaaaatcgaacttcaaaaaaaccgaactttcccaaaatcaaacttctgaaaatctgaacttctgaactcctgactcctaaatgctgtataataaaaaagaaacactatgaaaatcgaacaatgacaagcaacctacccaacaatacaaccaatacatttcgtctttctcccctgattagaattacattgttaacattatatatagcgttaacagttcccctaccatttttagcagaagtcaccaaagcacccacaccaccaatattattatgggtaggaattgtaataggttttgtggtattatatgcagtattaaccgaaagagtaactgtaaatgatcaggaaataaaagttagttatcctgtatgggttccctccttctttcgtaaaggttggtccctatcttggtccgatattaaaagtttaaaaccccgcagcaccggtcaaggaggtttagtttattatttcctcagtcacgatggaaaagcatatttattacctatgcgtgttgctggttttaaccgtttggtgaattttgtccaagcaaaaacaggtattgatactaccgatgttcgtcctttatctcaaccttggatgtatatgattttatttctttgtactatcttattattattagtagatgcttggactattaatacagctattttaggtaattggtaattggtaattggtaattggtaatttttaaagacgctttcctagcaactatcaactgtcacctgtcacctgtcacctgtcacctgtcaactgtcaactgtcacctgtcaactgtcaaccatgctcaaattagagcaaattaatctatttacaaagctcaaaagtcaagctagaaataatttaccaggatatccaattttacaggatatttcctttgaagtttttagtggcgatcgcatgacaattatcggtcattccggtgctggtaaaacttcccttctgcgactcatcaaccgtttaaccgaacccaccagtggtaaaatttatctggaaaatcaggaatatcaccaaattcccattatccagctacgtcaacaagtaacattagtacaccaagaaactaaacttttggggatgacagttggggaagccatagcttatcctttaattttgcgaaagtctccaaagcagcaaattcaggaaaaagttagttattggagagaacaactacaaattcctgaaaattggttaggacgtacccaagtacagctttccgcaggtcaaaaacaattagttgcgatcgctcgtgctttagttatccaaccccaaattttactgctagatgagcctttttccgccctagaccccgcacaaacttcccttttgtcaaacgtcctcaaccaaccagttcaagacccttcccaaccccttaaaaccgcgatattgatggtaaacaatcaacttgacattgcccaagaatttagcaaccgtgtattgcatctccagcaaggtcaaattgttgccaacctacccacctcacaagtcaactgggaagacctaaaaaccaacttgatagcagcacaaaatcaagtagatggtgattggtgattggtgattggtgattggtaattggtgattgggaaagagcaagtcctaagttgacaatttcatagacaaaactatacttgtattgacaaaaatcaatatatttttaggaaaaaatcaactacttgatatataatacggtgatatcaagtattgaattgagactattgccgacgcgaaaaccaagcaatgatggtggtagtctttttcagaaacttaattggaacacaatcgcgtctggctaaggcgtgaaagtctactgagggataactgctcccatgctcccgttgaagtagaaagtaaagtctagttttgtctaggttttatatagcaggt

SEQ ID NO: 63 - DNA, 30448 bp, Sphaerospermopsis sp. LEGE 00249
  LEGE00249_79
ttaaaagaatttatttagatgaattaccaccaggttcaataggaatggggttaattgaattaattgtcagtaaagaagcacaagcaccagaattagtgaaaaacctcatggacagaaccaaaacagaaattgaggatgacaacgaaaaacaaagtattatagaattgttagagactgttttattgtcaaagttttcacaattaagccgtcaggagatagaagcaatgtttttagtgagtgatattaagcaaacaagagtatatcaagaagcaaagcaagaaggtagacaggagggtagacaggaaggtagacaggaaggtagacaggaaggtagacaggaaggtagaaaagatgaagcaatcaacttactattaaggatgttatctaagcggtttggaaagttgggtgatagttatattcaaaatctcaatattttgaatatagaacaattggaaaaactaggagaatcattattagattttaaagacattaatgatttggagaggtggttaaagtctgagatcagtcagtaataaataaacagatccccgatttctgtcatcaatttataatttatagacatgatagtgaaagaagtcggggatctaaaacttactctaaaccctactttttataagcattcatccaatgcagtaacaaacctaaaccccaacccaaaagcgggaaaatagcccaaaaataaccagaaccagtgaacaagtttaacaaaatcaaaaacccgttaacaatcaaaaaaaccatgaaatgtgatttaaactcttgctgtttttgatgattagacattgcttcttttttcacttctacttgtttttttaaccattcattttccgcagcaatgagagattccgaagaaacccctaattctgaagcaatttctattatttgttctcgcgtaaattctccctgttgcttgcgtttaaaagcaacttctaaaatttgctgcatttcctctgaattgtaagtcattatcaatacctaatctggtaaaaaatacttttgacatttacatctgaagtggtagaaatacaaccttaaaaatatttgacgttgttgttaaaaacaatttcgctaaatattctatcttttacatattagttattacagtattttaaaagacaatattatcaaagtttaagaaaacgaaccgcagagacgcagagaacgcagagaaattttggacgttgaagttatttttaaaactgttacctgtcacctatcatctataccatcccaaacggaaagaaacatcagtaacattaattacggatgcaaccaatttataacaatattctaattgactgggataataaggttgaaaaggttcacttaaactaatggttaatctaaatttatccggttcaaagttttctaagtttagtttttcgatcacatcttcacaggaatatattccctcttctaaaacgtttagtttctctatccacaccggatcagtaataggtaaatcataagaatttccacataaacaaaacaaacatctaaaattttttttattttgtgaattatatctcacctgccattctaacacctctggattaatcatcactaaggaagatttaagaggtgtattttgtaaatcttcataatctatctgtttatcaaaattacctaataattttggttctgaagaactacgtttaatttctggtttgattaaatttttaacttgttctaaacttgctttccctaaaatctgccatttataactataatgaattaggtaattttcaggatgatgacattgcggttcatgtctaataaaaggaatcctaataacatcaaataattctggttcttgaccatctctagtcatgaaatgttctggatataaagtaccatttcttctattagaaattggccgcaaccatccagaaccatcggtttttatccccgcaatacaaattccaccatgtttagtagattttgctaaacagataatatcaaatgtcaacatcttatattctcacttgcaccttacttgttacagtaatagtaaaatgagaagatttgaaaattgaacagtaaaactacttaacgcttaaacaaaacctaaatatatccgtgtctgagaatatactcaaagatgatgaatcttgatacttttatctaacttactatctaacttaccttgcaaatattcagctactaaccgccgatgacagttatggggtttaagttcactacacaacaaacaacttttatctatcatatctatagataatttcttttcaatttgtcgttgtgaaatcaaaagattgaatttttcctcatagacatcccaagttatttgcttttttttataagcatctaaaatatcttgagttggtgctaaatcaagaatatggatatattcaatatctgcaattttacgcagaaaatattgtaaatcttgcttttttgcaaatcccgcaagttgggaaacattgtttaatctggtatcaatcactcgtttaacaccagattttatcaaagtctcaaaaaattgttctgctttcttttgagtaaacccaatcgtaaataaattaacttcttgattttgcttattcatgatcatccttattttctgtatacgcgactttttcaccttgtaattgatatgctttttctactaactctgcacggttaaactgtttttcaatagtttggttggactggatatcaaataaagaaagttgtttagcagaactttgattttctggtaataaatcatataaagtatggagttttaaaactcgattttctaaatctttattagattctaaatctccagttttaagaatatgataaatattcaaacctgcattttttaaatgaggagaaatcaaaattgcccgatgacaaacaatgggatcttgttctgcacacattaaactaatttggaatttttgcgaaccttgaatcaaacgatttaaacctaatttaaacgcttccgtcgcagcaattaaatcatatctggccattccatctacataacaacttctatcactaggacgcgcacctaaattatcacccaaaggaacataagcgatatttacagttttcaatgctgcttttaaatttgattgattaaactgaggaaacctgcgactatagggactagaacgcacatcagctaaagcggtaacattgtgtttttgtaatagttcaataaaagattctatggtgtggttggaatgtccaatagtaaaggttttcatagaggttttattaaaatcctgaaaagtgattatatcatttatattacccaaatatcccaaaatatttgtaaaaacatctgcgttaaattaccatcagagaaattacttaactaataataccaatcagaattttcaccaggtttgagcatacgacgggaactcataatacaactttgggaagagatgatactgagtgaacatcataattgtataataaaagaagtacagtatattcataaatatgaacacaacaccctcccccagtgaaagagatgaaattcttaaacggttaaacaaaaaccgtcaaaatttattggatttatataaaaatcaatatgttgcttataatgctaatgggataatcgcacatagcgaaaatttacaagaagttttagaattagctaaagctacaaaacagaattttttaatttatttagttcctcatcacaccgcatctgtacaaattttaccaattcgtttccgaactgttgcgcgtcatgattggcaacccaattatagtgttaaattaaaacatggaaatatagaattttctgcaataatgttagtagattctggtgctgaattgagcttaatttctttgaaagtaggtcaagatttaggttatgctttagctgattcagaatcaactttgttagcagaaactattggtggtagggttgagtatgttttacgtaatgtagaaatgacaattgatggatataatttgaatgctcctgtagcatggttacaaagtaatacgggtggagaacaattattattaggtcgagaagttgtatttgataagtttaatattgaatttagacaagctgaggagaaaattattttctcatggcgtgaaaacttgcattgataacatccaatttcttgggtttccttgcgtcaacgtaacctactacttattgtctgaatcaggatatcccagatttaaggatttacaggattcagacaattacatcttgaaattacttcaataatatcttaatctctttgtttatttccttaattttctgctcaatttgagttaatatctcatgttttgattggtcaaaatttctcaatatataatgaaacatagttatcaatcatatttaagaaagattatcttacaaaaagaaatattaagattgatcaataaataagtatttacacggttacgtattgagtcttagagctaagataatagcgttgttgttaaactcatttgagtgagtgtagagcaatatggataaaatagtagacaaaatagctgctttaggtgtacctggtttggtgttagttgtggctatggcctttacaggatgggctggtgcggcagcaataacaacaggtttagccgtacttggcggaccttttggtatgcttggaggaattgctgtacttggggttcttggtttgatatcaaaaggattgacagattatggttttgaaaaaatttttcaagccactgtcgaagaactgagaaaaaaaggtaagtccaaatatgacatagaacgggaagttgaatcatatccaattgggcgtgatctgaaattgaaaatcaaagattatttgaaaacgattccctagttgcaagattcatgagatcaagccttgataaatttacacttaatatttcagttgtaaaacatttactgtaatgtttgtacatggtttacaaaatcaaatatgttgaatttattaagtgtactaagctgttacgcagatattttttagtttagagtgctggcagtaatatttttggacaaaaaaagtaaatgcgtaacaggttattaatagtaaaaatttaactaaattacacctgaaaaaacgatgacagacactaatgaatctattacagaaaaaaactttcaacaaaaggaaactaaccaaatatatgaaaatattaatattgagactcaaaaaactgaccggattcgtgcttacagtgaattaattaaatcaatatccaagtttatctggattgctgtagttttgataattattattcacttttggggcagtttttctactaatcacattaagcaaaaaatcaatccaacaacagtaaatataactattcctgaacaaaagcaatatcaaatttctagtgatgttacatctgcccttggtaaagccttagtcgctgctagacaatctgcatccaataatttagaacaatggaaaaatgaggtgatgcagcgcgtagatcatccatttctagattggtactacaactactttaatcagctaggaattggagcaaaatctatttggatcaatttgtactctatttcagaagaagaaaaagcagagaaactaattggcagttttcaacaagaatttgctaaacaagtttttcaaccatcgttaatgcagctagaaatggaacgttttacaagacaagctgttgatatatatgtttcagaagcaaatcgcaatttagcaggagttcaaagtgcttataatattcctcaacctacctgggaaagatttcttgaaggtttaggtagcataacttatgatactggaggacagcagcaagacctcacacttagggctgtttcacgtggtacaggctatttagctactactgcaatgatcaaggctattggttttattggtactaaaaaagttgttgcctctacagtaagtaaagcgacttctaaagcagtaacaaaattagcaaccaaaacagcagctaaagccgcagcagagggaagtggggaaatggcagttggtcttttaggattagaattattaaatccactggcaggtttgggtattattgtttgggatgtatgggatcattatcatactgttcaattagaaaggccaattctgcgagcaaacctggaaagttatttaaacgaggtcaaagagtcattgctaaacgatccagagaatggaattttatcttcggtcaataaattccacgacgggattcttaatagtttgaacagtaacttaggtgtgagttgatttacatttctgcatctaaagatgcccgacttctgagattattaatttaatcaattataaaattaatcaaagaagtcgtggatctgaatttatgaatactgataaaatcctgaaaatcctcaaatcctggaaatcctgattcagataaattgataaaattaataatcaactttacaaccccacagaaatacgatcatcacctttttccaaaaccagacgaaaaccacaagactgaaatatttgtaagaacttaccctgagttaatatcattttgttttccagaacaaatatcttgaataacagcaggagaaagattaactttctgagctaattgttcaacagaaatatgattattttccatgatataaattaacaattcagatagtaaaaactcctgatatcctgatgcaaatttagcttgaaaatcatcattttgcatcattctatcaaaagtggataactgttcattattcttcataatatcttccttcctcattttctgagttttccagtttttaatgactacatagcaaattaccattaacctttataacttttagttcaatatctggcttgggcttaaattcaaaagtaacctacctccaaaacattactctcgtctaaaccctcattttttaacagtttacgaatattactgataaagtgctgaaaaacttcaactctaaatggattattttccaggtatttaatataattttctctataagcaagacgaccttgataagttgcaaaattttttctaatattagaattaaggcgtttagctttccttaaaagaatcacctcatcaatatctgtaggagcagtgctaataggtgacatatctaaccattcacataaaagaaagtattttgctcctggaacagcggtttttacatcatgtgcagttgcacatccttcttgaaacattgttttatcaagattagtcttacactcgacagcgatataggcaagattagtaattatgcttttttcttgttgaaaatcgggaaaatgcgaagcttttaaatataattttcttgtaattgcaaaatcttggtttttagttctgacgcttaacccaccacccaaagctggaattgttaaactagactcaaaataaacagaagagaatgccttaatgggtccaatatctacttctaaatttgctatctccggtacgataaccgggttaattagataaggtaaaaattcctcaattatcgtattatctaattttaattgccccttttgtctatacaaaaaatcattaggactatcaaagattaaatcaatatctatatattttttatagtcaataagtaattttattaacagatttaacatttcatctgctggaactaataattctacagtttgtgttaaatcattaatccattggtaataaacatcaattgcttcagtaactctaggcttatcctgcacaggaattttagaattatcaagtaatgcgtttaatttttctaaatgaggagtaggataattcttatgcatacgtcttgaagtcaaaaattgattttataaaaaattattaatcttaaataaaggtgatttatgcaccagtttagcacgtttttttgcatcaattatttctttataaatatcactttctgcattttttgaaactgaggttaaaatctctattgccagttctgttgcaaaattatcatcaactaattcatcattgttgatgggtaacaaatgtagaatatcctcataaattatttctccaaacttattttgaaattttctttcttgcagtaaatcaatttcaaaccctgccccaccaatagctaaagcagcaactaatttactattttcaaacctcacaccacgcacactagactctcttccaatgatcagaattactctaccatctttgctaattaacctccgaatttctttgagaacatccaacatatctagagcgtattgaacaaccgttaaaaatctattttgacgatgttttctatttgcacctatttctgatttagctattgttaataaatcccatcctaacatttccatgactctacgattattttgatggtagttaaagacattaatataaggaggagatgtgattacaatatctacactatgatctgttaaaggaatataacgtgcatcttgatgaattacgttacatggctgtagagaataaggaagagatttaataatatttatatgtttctgtaatgactttttaaaatcaagtaaatttcttggctgtctctgctggctatagttaataatggcattaaccagtaaattgtgcaataattcttcattttgagcttgttttaatattttaaaaataaatttttcttctatttcatgctggtctaaatctttttgttcttgagcaaaaccgtaaaaaaataaatctcctgtaaacggtaacaagttttcagcaactattgtttctgctaatttaattaatctttctctatcagaaattttaagattaataaaatgagcagtcttagccatttccacagcagcaggatttatatcagtaccataacaggataaaccctgacgtgctgcttcaaataaagtcgttccactaccagcaaatggatctaaaactacatgattagtattactataaactttaataaataattctactagctctggtgaaaattgccctctccagggtaaaatacttgttctagtcttattttttaagtctaatttttcttggggaatatattttttatcataggaaatcatattaattttattaaaaatatcagctattaaacttatggttgttgacaaggttttattctccaatgattttattttgcacaaatatttcttacttagggcttgcttaataaagccaaaagcctgataaatcaaaggtttgaggctcataaaaaagacggtaggagcaaggttatagcgtcttgagtctgaaaaacctcgcacttttgtgggtagcaagagatgaaaaaacgtttttaactctcctcctgactcctgacttctagccctaacgaaaggactttttcagcaaaccctacttatgcagcatatattattataagtacccaggcaaaattaattgcacatagttattgaagaaaaaatctctgtaaaccttacctgttctctgttccctctcctaactatgaaatttattttgcacgactacttacaataatacctagccttttatcttatgccaactaaacccacaaaaaaagcgggctaaccgctaatgcttggttaacccgttcagctttgggaacgcgcagagaaattcttattgcaacaccaacttaacgttagcgttttgcaggccgcgctgttttacttcagctaaagttttgttaacggcgtatttttggttaatggagttgatcaactcggtttggttgtgcttcttagcaacgccccacaaatcagcgattaaatcaaaagaaccatcgctattgcgagaccaacctaaatcgtactcgccttccaatacagcaacgatgtcggaacgaacacgctgaccgttataaccacgaacatcagcttcagtctttacgctaatacctaagtcgcgcaaagaagatttgaggatttcggcatcggtgattttggtacgcagagtgctaaagtgagacatttgggtttcctccaatgagaagattgatgagaaaaacgacaacggtttctttttcagcgaagccgcattaatttgggattaattgggaagcggcttttttttcgtaacctgttagccttgtgagctaacctttcccctctggcatacagaggaaagcttttaaaactccatgcgctgatattcagcaacggaggctgcggcgggtctagcacgctgtctggcccagtctcttaaagctgtgacctgttcttgcatcgttcgtgacagcggcaaagttgacttcaatgcagcaataatatctaattgggtgaactcccgatcctgggcaaaagcttcatacatcgccgctacgatcgcctgttcaatttctgcccctgaaaaaccgtctgacatttttgctagttgttctaaatcaaatctagcaatatcttcccttcttttagtcaggtgaatgttgaagatatcctgacgttcttctggtgtgggcagatccacaaagaaaatttcatcaaagcgaccttttcttaaaaactcacccggtaaacgttctacccggttcgcagtcgccattacaaatactggagatttcttttcctgcatccaggtcaagaaagagccaaaaattctacttgatgtccccccatcagaatcaccagaacctgcactacccgcaaaagatttatccaactcgtcgataaacagaatcgttggggaaattgattctgctgttttcagggcatttcgcagatttgcttcacttcgacccaccattgagccatcgtaaactcgccccatatctaaacgcaagattggtaaaccccacaaacgggaggtagtcttggctatcagtgactttccacaaccaggaacacctaaaattaacatccctttcggttgcggcaaaccatactctctagctctttctgtgaaagcgttggagcgttgtttgagccactttttcaactcttctaaaccgcctacagcttcaatagtttcatcttcttcgatgtactctaaaataccgttacggcgtatgagttgtttcttttctgataaaactatatcaacttcatcttccgtcaaccgccccgttgttacctgagccttacgatatactttctcagtttcatctttagttagacctaaagctgctctcagcagtttttctctagcctcggtagtcaaccgtcgtccacgatgctgctcttgatgttgagttaaaactttattcaactcagacatatccggcagttggaagtcaataacaacaacttctttttctagttctattggtacttgttgcactggagacatcaaaatgatgttcttttgcattcccttaaaactagcgatcgcatcccgaagcgatctagttgttgccggagcatcaataaaaggatgtaaatctttaagaataaatataccgggttctttctgtctaatgatccactcaatcgccgcctctggagaaacggtattgtgttgagttgtactccggggttgaccgtattccacaatgccgtgagttactgtccaaacataaactcgacgttgaggctttaacaattgagaaattgtgtagattgcttgctctgcccgttcttcctcggaggtcacaaggtagattaaagggtattgagcttgaatgagtatgtttagctcttctttcatatctatcgacctacttgagaccttatagagacagtacaatcatcgccgttggtcagaacaaccaaatctattattaattcatccattcattattcctaactagcaaggtactaattcttcctcacccttgggatgggtttcatcttcttccatttcctcaatggatagatgttcttgaccaattagtcctggctgattacccaaagctactaattccccgttacgtaaaacaagtgaactttcacaagcgggacaggagtaaaccctgtgagttctgccgtaagaagactcttccaattcttcaaccaattctgagttagtcaggtagaaactgagcgctcgttccgctaggtctgacatcggttctgagtcaacagcagaacgaatttttaattttctgtgcaattccggcgataaatataacgtaaccttctgcttagtttgcatacgactttctagtggtcttacccgggtatgtatcttacgttatcggttcttttatttcttgtcaacccattcagacgttttgatggcatttttgtaatatttcttaataatagcaggcaggagccaggataataagaataaatttcttgcctgttccctgttccctgttccctgaaaatagtaatttatgtaacaataaacctaagaaataaaacggtgtaaaaagagagtctattttagccgaatctatgagaataaagtctaatcagacttgagctaaagtcaataggggtaaagggtgtgattatgtctactgctgccgtcgaaacttgtaatttgaggcgagtcatcggtttactagtctccagtgttggcacggctatactttgtgggggttgcagtgctaatggcttttggacatctgaacagaagtgggaaacataccaaaatccccgttatgggtttgagtttccctatccgagtaactggactgccattacatcagacaacaacgatggagtaatatttgtttcatcacaaagccaagatacaaaaattcgcgcttgggcgagtaatgatttaccaaagttacaaaacccagaaacatcaaaacagatagaccaaaactttaaaacggatcagggtatatctggggtgctagtggtagaagttggtcaacaagtcagttcaatgaaactaactatcaatcaagaacaagtcaactatcactggcagggacaaacgagtagtaaagagtttaaagattactaccgcttgttttactacattgccaaacagtacaaaattaagtgattggtgattggtgattgggaaaaataaaattgattacccagtccccagtccccagtctccttaatcaagaattaatgaactagaggggacagaaacctggtagatttagctatcagcgagtaaaaactggtaaagatgaaagtcctggttattggtggcgatgggtattgcggttgggcaaccgcactttacctttctaatcgaggttatgaagttggaattctagacagtttggtgcgtcggcactgggacaatgaactcggtgttgagactctaaccccaattgcaccaattcagcagcgtctccaacgatggaaagatttgactggtaaatctatcgacctatttatcggcgatattaccaattacagttttctgcacaaagctttgcatcaatttcagccagatgccatagtgcattttggtgaacagcgttcagcgccattttcgatgatcgaccgtgaacacgcagttctcacccaggttaataatgtagtcggtacgctgaacctgctgtacatcatgcgggaagatttcccagattgtcatttggtgaaattgggaactatgggtgaatatggaacacccaatattgatatcgaagaaggctatatcaccattgaacacaacggacgtaaggatacattgccctatcctaaacagcccggttcaatgtatcacctgagcaaagttcacgatagccataatatccactttgcttgtcggatctggggtttacgagcaactgatctgaatcaaggtattgtttatggcgttctaaccgaagaaactggtatggacgaacttttgatcaaccgccttgattatgatggtgtgtttggtactgcacttaaccgtttctgtattcaagcagcaataggtcatcctttgactgtttacggtaaaggtggacaaactcgcggtttcttggatattcgggatacagtgcgttgtattgaactggcgatcgccaacccagcccaacccggagaattccgcgtatttaaccaattcactgaattattcagcgttggtgacttagcgttaatggtgaaaaaagccggtaacgcaatggggctaaatgtcgaaatcaacaacattgacaaccccagaattgaaaaagaagaacattacttcaacgctaaaaacaccaaattgctggatttaggcttgcaacctcattatctctctgattctctacttgattcactgttaaactttgcggtcaagtatcagaaacgagttgataataatcaaattctgcctaaagtcacttggcacagataattaggtgacaggtgacaggtgacaggtgacagagagcaggggaagcaggggaagcagggggagaaaattaaaaggcaaaagttacaattttcatttctcctgccacctgccacctgcccctgccacctgccccctgcctcctgactccttgatctcctgactccttgatctcctttcttatgaaaattgccctattcactgaaacttttttacccaaggttgatggtattgtcacccgtcttcgtcacaccgttgatcatctgcaacgggacggaaatcaagttatggtattttgcccagaaggtggcatcacagaacacaaaggagcaaaagtttacggtgtgacggggtttccactgcctttgtatccagagttaaaattagcactgcctcgtcctgctatcggtcacgctttagaacagtttcagccggatattattcatgttgttaatcccgccgttctgggattatcaggtattttttatagtaaggttctcaaaattcccctggtggcttcttaccatacccacttacctcaatatctgcaacattacggtttgggaatgttagaaggtttactttgggaattactcaaaggcgctcataatcaagctgcattaaatttgtgtacctccacagcaatgatcgaggaactggcagcacatggtatagaaagattagatttgtggcaacgaggagtagatacagaattattccatcctgatttagcaagtctggaaatgcgatcgcacttatcccaaggtcatccagaaagccccttattgttgtatgtaggtcgtctttcggcagaaaaggaaattgaacgcattaaaccgattttagaagccattcctgatgccagattagctttagttggagatggtccaaatcggcaaaatttagagaaacactttgcaggtacaaatacccattttgtcggttatttaatgggtaaagaattaggttcagcctttgctagtgcagatgtgtttatttttccttctcggacagagacactaggattagtattattagaagcaatggccgccggatgtccagtagtagcagcccgttctggtggtattcctgatattgtgacagatggtgtaaatggttatctttttgaccctaaagcggacattcaagaggcaattgatgttactataaagttgttacaacaacaacatgaaataaatattatccgtgaaaatgctcgtcaggaagcagaaaaatggggatggcctgctgctacacgacaattacaatattattacaaaaaggtgattggtgatgcaattttggattttggattttagattttagatgaaaaaatttggtacaagcctcgtccttcaggacggaaacaatcgtagttcccctatccaactcttgaaactgtcacctgtcacctgtcacctagccttcacagataactttttcagcaaaccctatctatccacctggaacgtgcctacaattaccaaaaaacaccacctccaaattcttgggatggtgtttggacaatggttacaaagtagggaatggtgactggtgactgggaagatggggagaaaattctttacctgttctctgttccctattcactgttcactgttcccttctttccctatcaactatcatcagcatcgttattttgaaagggttcttcacctatcctcagttgtttttttgatctttttaattgtttccacagagccttgatttgttcgtaagcttcctctggtggaagtttaccacctgtttctaagttacaaatataactaactcgctgggcaaattcctgtaaatttgcgttgaaaactaagttttcaggctggacatgaccgtagtagcgaccacgaggatagagaaaatcatctttgctcactatatttttctccatgtattgaattctcctcctgattttcttgtttatagtaaaaccactagtacaacacggcgtaaataaagctactatttaaaataggcaaaaaacctaccccatcagcttttggacttttgaatgcgtgatttccgcaaagcggtaataggcactcttatttctaatttattaagtcaggagaacgcttaagattaaaccgtgattatgggaaagtgttgcagcgattggtcaatttcaactttgacaaaataatcaagttgtaagttattaagcatcaggctgtcaaaaaaagtttatgtcaaagtgaccaaagccattcacgagcgaacacccgttctatatctttatatatcttttgtaaagattaattgcaatctcttggatgaatgttttactacttctcctatttttctcaattatttcatcttattcctaatttgcaaaaaatgggttttaattaaattcaacaaactaaattagctgataaagaattaatatatatttttctataatttttaaagaatttgttcacaaaaaattacaaaaattttaaaaaaaacataaaacttttatgcctctcctgcctaagtttcgactgcgctcaacacaagtctagcacctgtaaatcttttacctacttccaggaggcactagaactacgaagtagaaccccatagatttagttgtcaaggtacagattgccgttaggaagttaggtttttatacaggttgattaccgttcctgtgagaatgattatagcacaggtgactgaggcgtaaacgcctccttatgctttcatcccttgcctcaaggacggttaagtttttccgccaccctccaaaactcaaccgttcggctgaagctcacggcgaagcctcaagggttttcagcccattttcttataagttataggttatgggttaccagttacatcacgttgcgagtgaatgaagtacacatattcatgttataaatcttgcggtatggacaggaaagccagcccttgtgtagcgttcggctgataaaatggttaagctggaaaccattgccctgcaaatgtatctaccaccatgtctgttaataccaaactatacgaaggcaaagccaaaattctctacaccacagacgagcctgaagtcttgttggctgattttaaagatgatgcaactgcgtttaatgctcaaaagcggggtagcatccagggaaaaggtagcataaactgcaccatttccagcaagttgtttgaacagttggcagcgcatggcatcaagacacattatattgattgtccagcgcccaatcaaatgctggtgaaagcagttaagattgtgccattggaagttgtggtcagaaatatagctgctggtagtctttgtcaacaaacaggattgccactaggtacaattctggaacagcctttggtagatttttattacaaagatgaccaattgggagatcctctactcacacgcgatcgcttactgctcctgcaactagcaactgaggaacaagttgacagtattgcccatctggcattacaaatcaatgactttctcaaaagcttttggcaaaagtgcggcataaccctagtagattttaaactcgaatttggtttggactcacaacagcagttgttgttggccgatgaaataagtcctgatacctgtcgtttatgggatatgacagaaaatgatcctaaccgtcgagtaatggataaagatcggtttcgtagagatttaggaaatgtagaaaatgcctaccaggaggttttacaaagggtattacaagtagtagagagcaaaaattaactgtgtgtacatagtcatttttctgatatgactaatgactaatgaccagtgactcatgacgaatgacgaatgacttaattgtgtgtggtagtgaagaggaatatgagtaaaaagcatttatctcctgtatttctggcagttgtagccatcgctgtccctgttgacaactcactcagtgcgactgcacaaactcctgataaaacccagcaagtaacagaggttgccacggtagaaaccaaccagccactaccacaggaaactggtcaaaatgatgttagcgcaaatcaagaaactcccgtcttggcaaaggcagtagttataaaacccgaatctgactcatcgacacctgctgtcaaagtctcaccaacagctaactcagcatcaatagcaacaccagaagtaatcataacaacggcaacaacaccctcaaaaacggctcaaattctcaaagctgcattatctcgcaattcagaacagaaagcaaaatcagcagtaattatatcaacggcaacaacaccaacaaaaactgcacaagcactagaaccagaagtcactcctgacagcaattctactcaggaaaatgccgagccacccacagcacaaccgactttccctagtaattcagaaacaacggaaccccgtgtactagtgtcagaagtagcagtaacatcaccagatggagcaatctcaccagaactagaaaaccaagtttaccgagtgattcgtacccaaccaggacaaacaaccacccgttcccaattacaagaagatattaatgctatatttgccacaggtttcttctctaacgtgcgagccgtaccagaagatacacctgtgggtgtaagggtgagtttcgtggttgatcctaatcctgtcctgagtaaagtagaagtcgaagctaaccctggaactgatgttccttctgtactcccaactaacacagtagataaaatcttcagtgaacagtatggtaaaatcctcaacttgcgtgacttgcaagaaggaattaaacagttaaccaaagagtatcaagacagaggttatgtactagctaacgtgattggagcgccaaaagtctcagaaaccggagttgtcaccctacaagtagcagaaggggtagtagaagatgtcaaagttcgcttccgtaataaagaaggacaggaagtagacgaaaaaggagaacccattcggggacgcacaaaagaatatgtaattaaacgggaattagaattaaagtctggtcaagtatttaaccgtaatacagtccaaaaagacttacaaagagtatttgggctgggattgtttgaagatgtgaatgtgtcccttgaccctggtacagaccccagtaaagttgatgtagtggtgaatgtagctgaacgcagcagtggttcaatagctgctggtgctggtattagttctgccagtggattatttggtacaattagctatcaacagcaaaacctgggaggtagaaaccagaaactaggggcagaagtgcagctaggtgaaagagaactgctgtttgatctgcggttgacagatccgtggattgcgggtgatccttaccgcacttcttatacagctaatattttccgtcgtcgttcaatttctctgatttttgaaggtaaggatgacaacattgaaacctataaccccaataatcccactaatacaaatgatcaagatcgtccccggattacccgtttaggtggtggtgtttcttttactcgtcccctttctcctaatccttatgaaaagtcagagtgggtggcttcagccggtttgcaatatcaaagagtttctagccgtgatgctgatggtaatgtgagaaaagaaggggcaagatttaatgataatggtcagcaaattagcgataggattcccctaacccaatcggaaacaggtgaagacgatttattattattacaactaggcgcacaacgcgatcgccgtaataatcccttacaacctaccaacggttcttatctccgtgtcggagttgatcaatctgtacccataggctcaggtaatattttcctgaccagagttaggggtaactacagccaatatttgcctgtgaactttttgagttttggcaaaggtccacaaactctggcgtttaatatccaaggtggtacaattctcggagacttacccccctacgaagcttttacccttggcggtagtaattctgtgcgtggttacgatgaaggtagattagccactggacgtagttatgtacaagcatctgttgaataccgttttcctgtgttctctgtagtcagtggcgcactattttttgattatggtagtgatttgggaagtagtaccagagcagcagaaattcttaacaaaaatggtagcggctatggttatggtttaggtgtgcgtgtacagtctccacttggacctattcgcatagattatggtttaagtgatgatggtgatagccgcattaactttgggattggggaaaggttttaagaggtgactggtgactggtgactggggataaatatttacctcctgacttctgactcctgacttctactttcagggtgtttactacatacagaacaaatgagtaacaaaaagcaaaatcatatattggtttttaggctatgcaccaacacacattagctggggaaattatccaaacaggtgtgggactgcatagcggtgtaaataccagggtgcggatactaccaggagaaccgggaagcgatcgctattttgtgcgggtggatttgcccaattcgccgataattcctgctaaaattgcaacagttaatcaaactgttctctcgactcagttggggacagatgagatttatgttcgcacggtagagcatttgttagcgtctttgtccgctatgggtgtggataatgcgcggattgaaattgatggaccagaagtaccgctgttagatggttcggctcaaatttggactgatagtattgctgctgtgggtttggtatcacagtctgttggtgatgaatcagcgcctatagttatcaaagaacctatttcggttcatcaaggtgatacttttgtctgcgcttttcccgcaccagaaacccgttttagctatgggattgattttgatgtacctgcaattggtaatcaatggtacagtttctcattatctagtaatctagaaaatacgaaaaattcctttgtgacagaaattgcaccggctcgtacttttgggttattacatcaaattgaatatctgcaaaaatcaggattgatcaaaggtggcagcttggataatgctcttgtttgtggtgctgatggttggctaaatccaccgttaagatttgcaaatgagccagtacgtcataaaatcttggatttagtgggagatattagcttattaggtaaatttcctgttgctcacttctttgcttacaaagctagtcacaatctccatattcaattggcaaagaagattttagaattttgctgaggaatttggctaaaaattaactaaaatttaagattgtacgctatgttctagcctacttaatttccagattcttataaaatatagtaccaatgtcaactctcacccaagctaattctactcaagtgactacatctgaaggagaacatcaggaaaccaatacacaggcaattaaaacaaccttcacggtggaagagattcagcaactgctaccacaccgttatccttttttgcttgtcgataaaattattgactatgttcctggaaaattggctgtgggtgtaaaaaacgttacctttaatgaacctcagttccaaggtcatttccccggacgctcattgatgcctggtgtactcattgtagaagcaatggcgcaggttggaggggttattatgacccaaatgcctgatataccaaaaggactgtttgtgtttgtgggtattgataaagtccgtttccgtcgccaagtcgtacctggtgatcagttaattatgacagtggaactgttgtctattaagcagcgtcgttttggtaaaatgcaaggacgagccgaagttgatggacaactggctgctgaaggggagctaatgttttctttggttagctaagtttagctacaactaggctggatttggctttttagatttggggcatagccgtgaattgccctaagtcaattataagtaagaataactgtaaacacgaaaaatcacaagcgtatttactgttggctggactttgatcagacaattttggatttaaggtttaagatttgtttcaataataaatttaggtacttgtacccttttgttatttttagatagctatcttcaatccaaaatctaaaatccaaaatccaaaattcgtgatcctcacacataacacacataatttattttgcccgacacttttttttcaatgaactcagttctggagagtcacccttgaagacacttattcatccaactgctgtaatacatcctgatgcggaactccactcaacggtgcaagtcggtgcttatgctgtgattggagcgaatgtcaaagtcggaccggaaactgtaattggcgctcatgcagttttagatggtctttgtgaaatcggggcgggaaatcatatttttcccggtgctgttattggtatggaaccccaggatctcaagtatgtgggagaacctacttgggtaaaaattggtgataataatgctattcgtgagtatgtgactattaaccgcgctactggtcggggtgaagcgacgatcatcggtaacgggaatttactgatggcttatgttcatgttggacataattgcgtgattgaggactcggtggttattgctaattctgtggctttagcgggtcatgttcacatcgagtcaagagccagattaagcggggttttaggtgttcatcagtttgtacatatcggtggtatgtctatgattggtgggatgactcgcattgatcgagatgttcctccttatatgttggttgagggcaatccatcacgggtgcgatcgctcaatttggtggggttaaaacgctcaggaatgcccgctaatgagtttcaacttctgaaaaaagcttttcgcattctctaccgttctgatttgctgtttaaagaggctttggcagagttggaattgttgggagataccgcacagttggaacatctacgccgttttctgctattgtcgcaaatgccaggaagacgcggtttaattcccggaaagggaaagagtaccgcaagtgatgagtcgtgatttatgagtgatgaatgatgaatcacatctagaacagaagtcaggagtcactggttcgacacttcgaccgcgctcagtgcatcgcttcgctcaccaaccggagtcaggagtcaggagtaaaatcggcttggtgtatagggttaaatttagattctttacttcattgatctgcaatctgttgtatattcatcattcatttttaggagtcaggagttaggagtcaggagtcagaatatattctcactgggatgatttttggcgtaacttttgaaaagctgattgtttataaatataaagtcataaaaatctaaaatctaaaatctaaaattcaaatgcgtatatttatcagcactggggaagtttctggcgatttacaaggggcgttattaattactgcgctgcaaaatcaagctcaagctttagggttaaatttagacattgtggccttgggtggtgagaagatggccgcagcaggggcgacaattttaggggatactagcggtattggttcgatggggataattgaagctttgccgtattttattcctactattcaggtacaaaaaagggcgatcgcctatctgcaaaaaaatccccctgatatcatagttttgattgattatatgactcctaatatcgggattggtagttatatgaatgaacattttcccgatgttcctgtggtgtattacatcgcgcctcaagaatgggtgtggtcgatgagtttggagagaactaaaaaaattgttagttttacagataagctattagcaattttcccagaagaagctcgttattatcaagaaaaaggggctaacgttaattgggtgggtcatcctttagttgataaaatggctaatgcaccaagtagaaaagatgcgcgggaaatgttaggaattaaagaggaagaaatagcgatcgctcttttacctgcttcccgtagtcaagaattaaaatatttattacctgtcatttttcaagctgctcaaaatattcaatctaagttaccaacagcgcggttttttattcctttatctttggaaaagttcagagataaaattgccaaatctattgaagattatgctttaaaagcaacaatattatctggtaaacaacaggaaatttttgctgctgtagatttggcaattactaaatctggaacagcaaatttagagttagctttagctaatgttccccaggtagtagtttacagtcttagtccttttactgcttgggttgcgcggaaaattcttaaaggttcaattccctttgcttcacctgtaaatttagttgtgatgcgggaaattgttccagaatttttacaggaacaagcaacagtagagaatattactcaagcaggaatggaattattattaaatactgaaaagcgggaaagaactttattagattatcaagaaatgcggcaatgtctgggagatttgggagtgtgcgatcgcgctgctaaggaaattttagaaatgcggtgattggtaattggtaattggtaattggtaattggtgataagatttattatattgttccctattccctattctctaattaaatagaaaaaataagtctgtaggggtttagcactactcaacccttacaatttataatgttatattgataaacaataactaatcaatgatgaaaaaaagacccatagcagttgatttgtttgcaggtgcaggaggaatgaccctgggttttgaacaagctggttttgatgtccttgctgctgtagaattagaccctatacattgtgcaattcatcaatttaattttcctttttggaaggtgttatgtaaaagtgtagaagatactacaggattagaaattagaaatagtagcgaaattgaaaatcaagaaattgatgttgtttttggtggtccaccgtgtcaagggttttcattaattggtaaacggtcttttgatgaccccagaaattctttagtgtttcattttattaggttggttttagaattacaacctaaatattttgttatggaaaatgttaaaggaatgacagtaggtaaacacaaagaatttattgccgaaattattgatacttttgaaaataacggttataaagtaaatcataattatcaagttttaaatgctgctaattatggagtaccgcaaaatcgagaaagattgtttttactaggttgtcgtcgagatttagaattaccaaattatcctgataaaatcacccatccagctaaattaaatactaactcaaaaaaagctgtgaaactacctgcaacccctacggtgtgggaagcattacaagatttaccaacaattgaaaattacccagaattattacaacaagattgggttttagctgaatttggtaaacccagtaaatacgggatgaaaatgcgtaatctgtgcattgctaataataattattcctactcccgtaaatttgatcatcacattttaacatcgagtttaagaacaaaacatagtcctgcatctgaagaaagatttgcgtcaactcctcatggtaaaaatgaaccaattagccgtttttataaactcgatcctgacggtttatgtaatacattaagagcaggaacagctagtaataaaggtgcttttacctctcctcgtcctatacatccatttacaccaagatgtatcactgttagggaagctgcgcgtttacactcctttcctgactggtttagatttcatccgacaaaatggcatggttttagacaaattggtaattctgttcctccacttttagcgcaagcggtagcagcggaaattattaaggttttgaatgtggaagttgaacaacctacaagtgttaaaattttagatgaacttagtttattaacacttgatatgtcagatgcagctaaatattttggagtgaaccctcatgttatagaacctagaacaagaaaaaaatgattatcactcaacgatgtttttttaccaaggaataagtaccatgaaagaaggtttatataactcggttattatcggaattttccaacgttattacacaagtggattggaatattttgaatttaatcggaatgaactacctgaaattgctcaagagttaggtattcaatcagctaaaaatttaggagatattcgcttttagatttagaaaaccactacctaaagtaattacagatactgctcccgaagggttagaatggattatcgaattaaatggtactggtaactattgctttcgactggtaaagattaatcggattattcccaatcaaaatttaataccaattaaaataccggatgcaacacctgaaattattaatcaatatatgtcaggtgatgaacaagctcttttaactaaaatccgatataatcgtttaatagatatatttctgagcattacagcatactctttacaaaatcacctcagaactaatgttaagggtattggacaaatagaaatagatgaggtttatgttggtgtgaataacaatggtatgcagtttatcatacctgttcaagcaaaagcaggaagtgatcaactttctgtggtacaaaccaaacaagatattagttattgttttgataaattctctagcttagtttgtcgttcgatatcagcacaatttatgaacaatggacttattactatgtttgaactttcaatatatgaaggtgaagtaaaaatagtccaggagaagcattataaacttgtcccagcagatcaaattacagaaaatgatttgcaaaattctaggaattttacataattatgactgtcaccaaatctttatcactaacactagaacagtttctcaaattaccagaaactaaaccaccaaatgaatatatcaacggcgaaattattcaaaaacccatgccaaaaactcgccattctcgacttcaaagtaaaatcattaatactgtaaatcaagtcacagaagcaaataaaattgcttatgcttttccagagttacgttgtacattcgcaggtagatcaattattccagatatagccattattcgctgggaaaatatcgcctttgatgataatggtgaaccagtagatgatgttgtgatcgcaccagattggactatagaaattttgtctccagaacaaagttctaatagagtgactggcaatattttacattgtattaaatatgcttgtcaacttggatggttaattgatccagatgatagatcaattttgatgtttcaacctcaaaaagaaccagaattaaaatatgcaaaagatgatttaattatcttgacgggagttgaattaaatttaacagtagaagaagtatttggttggtttaaaatgagtgagtaatcaaatacccagatccccgacttcttgaagaaatcggggatcttaataaaaactaatttctcttctgtccagtagctaaatcattaggattaatattaatcaaaggaacagcaccattaccacccatcaccatcgggaaacgaccatcccatttttctatcgcttgcttttgcaataattccggtgttaaagtcaatctttgtaatctttgtgcttccgcttgacctttagcacggttaacttctgcttgtgcttcttgggtcgctttttgggcaataaaacttgcttgttttgcttcttgttccgctatttgtttcgcttcgatcgctctactaaactctggagaaaaggaaaaattgactaaagatacatcatctacaattacaccgtaaggttctaaacgaccttttaaatttgcgtcgatttcttgttttaattctgtgcgttttgtgatgatttcttcagcagtttttttagctgtagctgctttcaaaacttcggaaactgcgggtgtcataatcccattaacaattaattcttcatctccaacttgttgaaaaactcggttcactttcaacggatcaatgtgccagtttaccgctaattctgtggtaattgtttgcaaatctttagaagcagcaccagcattaaaactattttgttgcacgcgcacattgagctttttcactgttgtgacaatgggaataattgggtgtagtccttcatctaaaactgtatcttgcacctttccaaattgcatgacaacacccctttcaccagcattgacaatggcaaaaggacgcagcatcatcgctaaaaacaagaataataatcctccacctaaataaaatacaatttgtgaattgtgaaggacattgatgttattgtttctcatggctgtatgttccttaactcaactgtatgtgagagtagctatcagataaaaaaatcaagatttatacagaaaacttagcaaaaagttacatggggttgaatgtttagtctatatatagataagatacaaaattaaaattaggcatttcggaaaatcaagattttgatcacaatttaaatagacaaacaatatgcaaattccacaaattcatccttggccatctaccgttgaagaagcgatcgaaattcaagaaactttacgaaatcaagttattaccacagatcaactcaacacacctattcaatacgttgcaggtgtggatatgggttttctggaagatggtacaatgtgccgtgcagcggtagcagtgttaagttttcctgacttgaaagttgtggaaacaagcctagcataccgtcctacatcgtttccttatatacctggatttttatcttttcgggaaatacccgctattcttgatgccttggaaaaaattaaaaatatacctaatataatattatgtgatggtcaaggaattgcccatccacgcagatttggaatagcttgccatttaggtgttttagtggatataccaaccataggtgtagcaaaatctttacttattggcaaatatgaagaattatcagtagttagaggaagttggcaaccattaatacatacaagtgaaaccgtaggcgcagttttacggactcgtactggagttaaacctttgtatatttccacaggccatcgtattagtttacctacagcaattgactatgtattacgctgcacccctaaatatcggttgccagaaactacccgcattgctgataaactagcatctaacagataaagtataaaaagtataaatggtgaagataatcattctttaattttaattctcaagatttgctaaattgttaccaatcatgttaggaatcccacagcataaagttgaatccattaaatgtattaaagttatctaaaaatcatgaatgtactaactttacagtggcaagaagcaggtcaaaataaaattcaacaaatttatgaaaaacataacagcaaaaaccctggtacttgtcgcattggacgtgatccagcaaagtgtgatattgttttaactcatccgacagtatccggtttacatattgaaatattttttgattctcaaaagcaacgtttttatattagaaatttacgggaaataaaccccccacaaatagatggtaaatctttagttaaaggagaagtagctgtaagtgaaggcagcattatttatttaggacaacaacaactacaagttacggcaatttctgttagtagtattccttctaccatcatagtccaatcaccaaaacaacccgtacatcatcaccataaaccgtcaattccaacacaaccaaattcggtgtatggtttagactgtcctaaatgtcataaagtttccccaccagaaaatttacaaataggttgtccttggtgtggtacatctttagctgctgctgtgagtgtacttattgggtgattggtgacaggtgacaggtgacagaaaagagggagcatcccaaatatgtaaattaattttgatctaaccgaaaaaatgatctaaggtcttgatatgattgaaccgcaaaggacgcaaaggacacaaaggtaagagagtttaagagattttttggtgttgctgcggttattgtttgaaaattgggatgctccccagaaaagagggaataggaaaatcaggaaaataactaataactaataactaataactaataactaataactaataactaataactaatgactaatttacaaatacaattaagttgggaagatccaacaacgggagaaagacgagaaccaaaattaaatttaccgattgcttttggtagagaatttgggaaattacctacagaaattaggggtcagcgtgtttcgcggatgttgttaaatagtaatgaagtttctcgttatcatgctttaattgattgggagcaggattgggaacaaaataattttgtagttattgatcaaaatagtgctaatggtgtttttgttaatggtcaaaaaccagaaatgttgaatgtcgttacaaaagtttacatattcagttatagtagtcctattaagggtgaaaatgtcaacatctcatgatatcttccatccaatgaacataactaatttgttgacacatacaa

SEQ ID NO: 64 - DNA, 30448 bp, Sphaerospermopsis sp. LEGE 00249
  LEGE00249_80
gcataccgccagcgttcatcctgagccaggatcaaactctccgttttgttaagtttgtttagctcttttttgactgtcttttaatacctcagtccggtatcattttctttacttgacgcaggacttgctgtatactgtctttcaaactataatattttcaaggttcggtgtccctccgagtcccgctctctcgcggctctctttcaggcacttattcaatatagcgaacctatcttggaatgtcaactactttttccaagtttttttggattttttttctaatcagttcaaatccttgtggtgtaagggtttgagttaataaaattattggctcggaatgaatccagatggatttataaccctgggcgcatgattttttcagcgacttggggcaaaaactgttgcagtagataaagcagtttagatttaccaatcagcatttcgtaatgatcacggctgaagttacgccaaaattcctctactaaagtatctagctgtatcttcttgcctttaccccgtccttgggtcatgggtgtgtctactaaacgggcaataatcttaaaaactttgatgggagtacgttctagctgccagcttagggcttttgaggcaatatgcaaacctgctttactactacagtagatgggcgcactttgctttggtactaaagctagtttagatgtaatcttgattatggctgctgattgtttggtcaatagatggggaatcatgagtaggtttgacagggtgaaagatattgctgagtttgtttatttctgagtcgggaatttctgtgggcgatcgcaggacatgaaacaattgttgatagggttgattacacatatacttgactaaattccaaaggtgagaattcagatgaagagttctgtggctgtactaccaccgtttttggtactggatcaattgttgcaaagttggttaatggaggatattggtaggggcgatcgcactactcaatctcttttatcccaaaattcaactatcagacaagggaagtgggtagcaaaagcaccaggaataatcacaggtttaccgatagcagctagggtgtttcagttattaaatcatcaagtcaggtttgtagctgtaaagtctgagggtgcaaggtgtgaagcaggagacgtggtagcggaaattcagggttcattagatgcgttgttgatgggcgaacgggtggcgctaaatttggcgatgcggttaagtggaattgcaacgttaactaatatatatgtggagaaaatagcagatttacctgcaatgtttgtggatacgcgcaaaactacaccaggtttgagaatcttggaaaagtacgcatctgctgttgggggtgcgattaatcaccgcatggggttagatgatgcagtgatgattaaggataatcatattgcggcagttgggggtattagagaagctattacccgtattcgttcccaaatgccttatcctctcactattgaagtggaaacagaaagtttagaacaggtgcaagaagcattaaagtatcaagccgatattattatgttggataatatgcctttaacaatgatgactgaggctgtgcagttaattcgtgaacaggatagccgagtgaaaattgaagcatcgggaaatgtaagtttagaaactattcgcgcagtagcacaaactggtgttgattatatttctagtagtgcgccaattactcaatcaaggtggttggatttaagtatgaaaatgatttaagcaatgtagcagcagaggcaaagcctttgtgatggcattcccagtctccgactgggaacgagttaacgagttaagtatttttattagttaggaaatgtgtaaaacagctttgcctggaaaacgtctatctaccagtttttgagctacatcagcaatttctgtccaaggggcttctatgtcaatatgagggcgtaattgtcctgattctactaattccactaaccattttaaccccacagatgcggattcttgtttgagttcatggaagactattaaaccgtaaatactcgcaccaccaagggcataaagatttccagcattaaaagttacttctcttccggcagtagttccaaatactactgcttgaccatttgtacctaagaaacctaacgctttgccgagaacatcaccgcctacagaatctattattaaatgatatggtccatattgttgagcaggggatatatcttcaccaatgacaatgtgatgcgctcctgcttctttgacgataggttcatacttagaagtacgtagatgggctgtaacctttgcaccgcttaaccgtgctaattgaatagcaaagttaccgacaccaccagaagcccccgtaattaacacaggttgattgaggagaaaaccgccttttttcatgatatgataggctgttaaacctgctatgggtaatgtggcagcttgagcaaatgatacaaagcggggtagttctgcgagagagtgggtaggtactgcaactatttcaccccaagcaccggaggggagaaaacccactacacgcgctccttgtggtggtcctgaaccgtctgcggcgggtgtttctacagtaccggcgagatcccaaccaggccgccaacctgcttgagcagtagaagcgcgtctgagttcgccgcgattgagtgaaattgaggcaactttaattatggcttcgtttgttgcgggtgtgggtgctgcaacttcctttaatgctaaacgtcctggtacgttaggatcaacaacgacagcgcgaattttgttgttcatgtttttgatatcctggtttgggttaaaaacttgtttttctttggtttatattacaattactttatcagaatcaatttattatctttattgtctgaatattgacaaaactgatcacaaaaattatgatgactaacttaatcgaatacgaagacgctaacccagaagtacgcgcagtttacgacgatatccgcgctaccagacaaactgaatatatcaacaatttctggaaagctttagctaatcatcctccaactttacgccgtacttgggaaagtctcaaggaaattatggcgggttctggggaaattgatccactgatgagagaattaatttacattgctgtgagtgtgactaataactgtgaatattgcattgcctcacacaccgcagccgcaaaaaataagggtatgactgatacaatgtttggggaattgatggctattgttggtgctgcaaatatgactaataggtttgcaaatggttataaaattcctgtggatgaaatctttaaacagcagtaaaacttcaatcatggacaattaataattacctatcccttggagcgagaagattgaaaaagcggaatttttttcttttttcccctttaaaggggatattttaaaccttgaacgaaacaattatcaattgtcaattatcaattattttcccaacttgttggaaataccttcacaaccaccgggaatggtttttctgcttttttcgccacaccaagcacagcaataacgacgcacgggttctgacattctttgtacattgctaaaatcggcattttctactactgcaccggtgtattctccggtttcatagtcgggtgggtgggtgcgactgcggggtgaggctttttctaatgaaccataaaataaccggacactgtttaaatcggcattactcaaattagcttcatataaaatcgtgcgggcaaggttggctttgactaaatcacaaccactgaggttagcacgcactagatttgcttcactcaaatcagtccaccgtaaatcagtgtaagaaaggtctgcaccggctaacattacgcctaaatctattacccgtacaccttctattctgtcttcggcgtagccaccgctaccatcgagaatggctctacctaaacggcgatcgcgttttaatggtgttaacagtttggaacgggaaagaaagcgaagaattttggcttttccattgccatctacactactaaaaattgcggctgtgcgtccttctgctatggctctttcctgcggccagtcttctaataatccttcttcatctaatactaaatcagaaattccttgaaaataagaatctatggtttgttgttgagtaataatattttgttggactgtaagcaggttttgttgaatagttaaatctttagaaattacatattgtcgccaagctacataaacggcaataatagctataagaatttgtcctaaagcaccaaaccattctgctaaagttcctgaagcttcccagttaatttttttgccccaacgtaagagatgataacctaagccgctaaatttcaagaagccaataatacctaccaataaaccaataaaggctaataataatgttctatcttctggagaaaaccattctttgatcacatcttgcaaccaaggaaataacatagctatggataaaaccaaagttgcgaaagttcccaaaatacccaggaatgagttattaatagcaataccaataaaagttagggcgatcgctaataaagtaaaaatcaaagctctaggtttaacaacaacctgactgtgataacgttctctaaaaccagatattgcccttttgagggcattggtattttggggagattgtaaagaagaaatagctgctaaagcttgttgtgcagctaaaccttctgccgtgagttcattttcactagcaatatcaaaatcatcgcgttctaaattgtgttctggaataggttctgactgtggtggatgataagaattagattcaagagtcatttttagattttagattttagattttagattttagattggtaaattaattactgtcacctgtcacctctcccttataacctactttatcaacaagtcaggagtaagtatcactttcgctaacttttaactcctgacttttgctttgaaaatttattttttatggaaacggaaacaagaatttgttaagctagtcctaccaacttggcgctgaagtcccacattttttcagctttagcatcatcgctggcttcattggaaactttctgcacaaaggacttaccatcttttttctgtctatttccccaactccaataaattccagattgattgtaagctggatctgctactacatcggctactctttcaccagctaattcttcggaaacaaaccccccagtaatatatttttggaagacggggaagagtttctggaataggggataatggttgcggaatagggcggttgtagccacgcaaccgggatatagggaactaaaagtaatacccgttgactcatgatagcgtctgtgtaattctctcatggtcaaaacgttacaaactttactatctttgtaagctttaaccggttcaaatttcttaccgtcaatcatagtattgggagctttaaaaccagcttcaaaaccttttaaatctcctaaatcgggacgtgggggaattttaccgcctaactcgttggggttgtgtgtaactgttcctaaaatcaccagtctgggttcagaagtggaagctttctttagatcctccaacatcaagttacacagcaggaaatggccaagatggttagtagccacacttaactcatatccatcagggctaaataaaggctctttaatcaaaggcatatagatggcagcgttgcacaccaaagcatctaatgatctgcccgtagctctaaaatcctgaacaaattttcttacactatctaaagagcctaaatctatgtgtataatggtgtagctgtctttgggaatccccactgtttgggctgctgcttcggttttttccaggttgcgacaagccataataacgtgccaacctctcttagctaaagccttggctgcatacaaacccacaccagaggaagcacctgtgattataaccgttgatttatgctgttgttccatcgtcttgaaaatctgatgattgtagttcagttgttattatgatctcacaccatgttcatccatgatcagccttgtagctaacggattaaaacagggaaatgctgacaaaaaaaaggataacaatttttgctaagttgcatgagattaattcaatttaatttatatatcgacaaatcgtgggtgattgcatatttggcagatttatttgtaattattcaataaatccgcatatttggtagttttgccaacatgatcgagttgaatatacagtcaaagttatagataaattgccaatagattgtataaaataattgatcaactatatctagacatggtatagtttatgtgagttaatcaaaacttatcaaattcttgatttctttttcattcaaatacaagataattaatagcagtttagtggacttggatacaacttttaaacattcaaaaggcataacattaaattatgagttgcgtaggtgcagtatgattttaaggcgatactttattgcctgtggattcatgagttttttgactgttggttgtggtgatttggcaatatcatcaacagaatataccaagcaagttgtacaagaaaacaatgttgctcaactcatagcagaagtacaagatagtcaaaaagcggaaaaattattcattcaaggcaataattttttagataccagtcgctataaagaagctctgatattctataatcaagcgattgaaattaaaaaagacagcgtagaaacatgggtaaatcgaggtaatgccctgatagctttacatcggtatgaagaggctttagaatcctatgataaagcgatcgccattcgtccgaataaaaatgaagcttggtataatcgaggaaatgccttatcagctttacggcgttacgaggaagcagtaaaatcctacgatgaagctatagttattgaaccagataaatttgaagcttggatcaacagaggaattgcactaacaaaattacgcaggtacaaagaaggcttggcatcttacaatcaagctatcaggatcaaccaaaattcccatcaagcatattacaataaagcttgtaattatgccttacaaaataaaccagacctagcaattgagtacctagtaaaagctatgcaaatgcaacctgaaaaataccaaaaattagcccaaactgacacagattttgataaaatcagggataaaaaggaatttcaggaattattaaaatgaagaagttaggagtaagtaggggcgaagcattcggacaaaaatattgggaaaaaatcgataatttatcatccgaatgcttcacctgtacaggagtcaggagtcaggagtggaatagagaatgaaaaaactcctaattacaggtgcaagtggttttttagggtggcatctttgccaagtagcaaagacagagaaatgggaaatttatggtacttatgctacccattttttagaaataccagatgtaaaaatattgcaagttgatttaacagattttcagaaattaaaagaaatattccatcagataaaaccagatgcagtaattcatactgcggcacaatctcaaccaaattattgtcaactgcatccccagtcatcttatactattaatgttaccgcatcttgtaacattgccggactttgtgcagatcataatttaccattagcttttacctctaccgacttagtttttgatggtttaaaacctccctataaagaaacagatccagtgtcaccagtgaatatttatggtgaacaaaaagcgcaagcagaaacagaaatattacaattatatccccaaacagcaatttgtagaatgccgttaatgtttgggaaagaaacacccacagcgaaaagctttattcagggatttatccaaacattaaaagacggaaaagaactgaatttatttagagatgaatttcgcaccccagtaagtgcaaccatagccgcaaaaggtttattattagcattagaaaaagttaacgggataattcatttaggtggtaaagagagaatgtctcgttatgattttggtaaaattttagttgaagtaatgcaacttcccagcgataaattaaagtcatgtttgcaagatgatgtgaaaatgtcagcaccaaggccaaaggatgtttctttagatagtgaaaaagcgtttagtttgggatatcaaccattatctgtgagggaagaattagagaggttgtaaataagggattttgaggatttttttgtctgaatcaggatgtccaggattaaaggatgctagtgagtttgtcaatttcaacatcccaccaataatctacaaaatgagcgatctcacttgtttaaaaatctcttcaatatcaacaggtaaatagggagaaacaacatcttcagcaccatcatgtacatgatgaggataggttgcaatttcaggatgatggggtgcgttatcccaacgttttattagttctctattttcagtttgccaatgaaaactatatttaattatttctacttgtccagattctattttaaaaaactcaaacatttctaaaaaactaccattttttaatatcacacgataacgccataaacctttatcagtttgtgcttcttctctaagaatcgtaaaatttacaacttctggacacagtgtaattatagattttaagctgttgtgcatttaatttatataaggttaacaggcaagatgcctgttccacaagacttaagaatattaagattatacagtttagctgcataacagcttatccaggctaaataatcatcggcatttttcatatttttcataaagcttgttctaacttatggattttttttaaaatgtctttgcggagttcacataaaccaaaccattcaaaaaaatccatttcatcacctaaacgacctgagttaaattgttcctcaaattgttcacaatttagttgatatttttgttcaaatttttgtatgtctgagttatagatatctaatttttggcgatgacgggttaaaattacgtttaaaagttgtccaataattctatctagttctgtattgtcgttacaattttctgtgagtaattctaatttttctaatgtattcataattttagattggatgaagttgattagttttgcatattttagcacgttttatattttttgtcagaatcaggatatccaggattagaggattttcaggatgttattgtttatttgaggtggggattttgaggattttcaggatgttgttgttgatttgaagtggggattttgatgatttttttgtcagaatcaggatgtccaggattaaaggatttacaggatgttgttgtttacttgaagtggggattttgatgatttttttgtcagaatcaggatgtccaggattaaaggatttacaggatgtggttgttttattgtctatgagaagtacagattttaggatgtgagataatcaattatctgttaaattatctattttgatttgttgacttttagagtaactttattgtagaatcttcaaatattcacaaacaatttatcaatcacaatcctgaaaatcctttaatcctggacatcctgattctgacaatgaaaatttcatcatcccactaataacctacaaataacaatcctgtacatcctcaaatcctggacatcctgattcagacaatgaaaatttcagcatcccatgaataatctatcaatcacaatcctgtacatcctcaaatcctggacatcctgattcagacaatgaaaatttcatcatcccactaataacctacaaataacaatcctgtacatcctaaaatcctggttatcctgattcagacaatgaaaatttcagcatcccatgaataatctattaataacaatcctgtacatcctaaaatcctggacatcctgattcagacaatgaaaatttcagcatcccaccaataacctacaaataacaatcctgtacatccatgaacacgcccaataataaaaaattagatgaaatcacatatataataaatgggtgtgcaatgaagatacaccgaactttgggaaatggttttcaggaggtgatttatcaaagatgtatggaaattgagttacaaaaatcaggtttaggttttggaagagaggtagaacaagtaatttattatgaaggtattgaggtaggaacacgcagagcggattttatagttgaaaatcaggttgtggtggagttgaaagcgataattaatttagaagatgtccatttagcgcaagcaaaaaattatttggtagcttataattttcctgtgggtttattgattaattttggtggtttgaagttggaatataggaaggtttttaattctagatatcatgtttaattgtcagaatcaggataaccaggatttaaggattttcaggatgttgttgtttatttgaagtggggattttgaggatttttttgtcagaatcaggataaccaggatttaaggattttcaggatgttgttgtttatttgatgtggggattttaaggatttttttgtcagaatcaggataaccaggatttaaggattttcaggatgttgttgtttatttgatgtggggattttaaggatttttttgtctgaatcaggatatccaggattataggattttcaggatgtggttgttttattgtctatgagaaatagaaactttgggatgattgataagataaattatctgttaaattattaaattatctgctgttacttcttgactgttggtgtaactgtattttatcatctttcaatatttacagacaattcatcaattacaatcctgaaaatcctcaaatcctggacatcctgattctgacaatttaaaatttcagcatcccatgaataatctataaataacaatcctgtatatcctaaaatcctggacatcctgattcagacaatgaaaatttcaacatcccaccaataacctacaaattaccaactaaccatacaaactgtaggttgggtagaacgcagtgaaacccaacgatttaatcatcatatttgggtaaagtaaaaatttataagataatttataatattatattgtaattagatgtaagatttgctataatattaaaattatttagttaagtgaaaatcaatgatttcagaacaagaattattaacaaaatggcgatcattaccccaggataaacaagaagaagttttaaaatttgtggaatttatgcaattgaaaaccacagtcaaaaaaccgcctttaggggaacgtttacgagaaattcgctctagaattgttgcatctggtaaaccattattaaatgcagatgaaatagaacaagaattagctgctcgtagaggtggaatccaaggtacagaagaatgattataacttatattgattcaggggtgttactgagtgcaaccaatggtactggtttaattgcagaaaaagcattagaaatactatcagactcacaacgggtatttgctgctagtgagtttgtcagattagaagtaagtcctaaagcagtttatcatcagcaaacagcagaatctcaattttatgaagagttttttaatgatgttatttactgggcaaatgatctaacttatattgtacaagaggcttataaaatcgcttctcagtatggattagctgctatggatgcacttcatgtagctgctgctttttctgttggtgctgaggagttaattactactgagaagaaaacaaaaccgatgcacaaagtagttggtattaaagtaatttctatttttgattaagatgttttttgtctgacaatgaaaatttccacatcccaccaataacctcaaccaacagttgcactaaaatcaacattgtgagctaagatgttaaatataaatattcactacacaatataatgttatggcgatcgctatttccctgactccagaactagaagcaagactacgcgaaaaagcagcacaacaaggaaaagatattagtttagttgcggctgaattattaaaaaatatcctagattgggaattagaagactcacaagcagctattcaaggtattcaacaaggattagaagattttgaagcaggaagatttcgttcttttgatgattttgcaaaagaacaacgtcgtaaatataacctgcctcaagatgtatgaaatactatattgatatttcttatattgattcaggtttccaaggattaataatagaaataccacatccttcaaaatcagtaacattgcgtgttgctatagttgctttatgagtataacaaatagcagcaatttgagcatcaggttgagaaattggagtaccattttttcgtcgttgagatgcaatatcagcaaatgctacagcagcattttgatcaaaagctagaactcgtccagcgaaatcttcagaaaacattagttgtgctgtttgactaagttcttcgcgtcgttttccttcaggaagtaaagcaataccatagagaatttatgcttgagtaattgttgtagtaaacagactcattaaaggttgtgctgctacccattcacgaactattgctgatttttgagttttcatgagttcggaaatgacgtttgtatcaagaataatcatttttaaatgtgtaatttaatcagcaaatattgaatctgtgcggattggttctcttttaatttccggtaattccaaatcttcaaaatcggcaaaacgtttttcgattaaggttactaagtttataggattttgctgattttctatgagaacaagacggagaatttctgtaatttcttgttctagggaatttccatgtttttctgctcgtttctgtaactgatttttcagatcatcatcaaggttggaaagtgtaatattagtcataatcattttagggttaaaggatatgtttattatacactatcaatctaatttttttgtcagaatcaggatatccaggattataggatgtacaggatgttgttgttttattgtctatgagaaatagagactttgggatgattgataagataaattatctggttaaattattaaattatctgctgttacttcttgactgttggtgtaactgtattttatcatcttccaatatttacagacaatttatcaataacaatcctgtacatcctcaaatcctggacatcctcattcagacaatgaaaatttcaacatcccacaaataacctacaaataacaatcctgtacatcctaaaatcctggacatcctgattcagacaatgaaaatttcaacaccccaccaataacctacaaataacaatcctgaaaatcctaaaatcctggacatcctgattcagacaatgaaaatttcaacatcccaccaataacctacaaattaccaacgaaccatacaaactgtaggttgggtagaacgcagtgaaacccaacaatttaatcatcatctatattattgtgaaagtgttgggttttctaaggtaaaggtaaaaattgagcgatcgcactaaagttgttgtaatcaaaaaggccagcgcgggtcattagggtttaattccccatcagcgactagtcctgctagatatccaaactccgcatcgtcatcatcatttctatattcataatcataatcattatcattggcatcatcactatcatctatagtattcagaaaatcctgatatacttcttcaaattctttaggagttaaaactacctcctcatttcttaattccttaatataactatctccttgttgacaatactttctaaaatcaattatctgttgtttaggttctgagcaggggaaagctgtaaaaaatttattgagagttgtgagcatttccattagttttgagatactctctctttgctcattactataagatttagactgataataagctttatacaaagctaaatctaacaattctctcaactgctcgctattttggttgttatttatattttcgatattccagttacctctctttactaggtcttcgtcatgagtgcgtaaataggtataggtcgtatcaaatggtagaaaccgtttagctttggctagtctgtcatctaggggatgaaccttgtcaaaaaatacacgaggtataacgattggtttttgttgaaagcttgcacaaccataatctgtcaaaattacgaatttctcaaagtaaattatgtataaatcatattcatagtcatattcattatctgaacgaggactctcttttgtgtaagtacgatattctggataaatttctactttatcgtaactaggtaatatttcaagaatgttcattttcttattagtaaagttttgtaggttggttagaggacgttggaaaactttttcatgtggtatataaaactggtatatccccttaaatcccccttttaaaaggggttgggggtatctcaattaattctgatacttttcaaacatcctctgaagttaatttgataatctcttctagagtaaatcctttatcttcaaatttttggcttaattcaggatattccattagcacagaaataatatccctcaatacacgctttgtctcccatccttttgatttccacaattcctcagatgtttcttttccaacaatacttgcaaactgctcatagaatttagcctcactaatctcctgttgtttagcaagtgcagcattagcaacagtgaacacctgctttatatcctgcaataattcattcagcttttgttctggatctgtcattattgttaatataaccatttattaacttacctattttattttaacacaaattcaggcagtctgtagggtgcgttacatttcattaacgcaccctacaaattaactaactataagcctccatcggtaaacaagaacaaacaaaattccgatcgccaaaagcagcatctatcctacccacacttggccagaacttaaactccttactccaactagcaggataagcagcttgttcacgagaataatcatgtttccactcaccaacaatcaaactttccgcagtgtgaggcgcatttttcaacacattatcttgcagatccatcttaccagattcaatctcagaaatctcctttctaatggcaattaacgcctcacaaaaacgatccaattcttccttagattcgctttccgttggttcaaccattattgtaccagccacaggccaagaaacagtaggtgcatgaaaaccatagtccattaaccgcttcgcaacatcatcaatttcgatgtttgctgattttttcacagcacgtaaatctaaaatacattcatgtgctacaaaaccattttttccgcgatataaaaccggataaaaagattctaatttcttagcgatgtaattagcatttaaaatcgcaactttggtagcttccgttaacccctctgcacccatcattgcaatatacatccaagaaattaccaaaatactcgcacttccccaaggtgcagcagaaacagcaccagagaattttggattttggattttggattttggattattttcctgtattttaattacagaatgaccaggtaagaacggtacaagatgggaagcgacaccaataggacccattcccggaccaccaccaccatgaggaatacagaaagttttgtgtaagttcaaatgacaaacatcagcaccaatattaccaggacgacaaatacccacctgagcattcatattagcaccgtccatgtaaacttgtccaccatgttcatgaactatggcacaaatttcttgaattgcttcttcaaatactccatgagttgatggatatgtcaccattaaagctgctaattcatgactatgtttttcagctttcgcttttaaatcagcaacatcaatattaccctgatcatcacaagcaattcctacaaccttcattccacacattaccgcacttgcaggatttgtaccatgtgcagattgaggaattaaacaaacgtttctgtgtgcttctccccgattttgatgatattctctaattaccaaaagtcccgcatattcaccttgagaacctgcatttggttgtaaagaaattcctgcaaaacctgtaatttctcctaaccatgcttctatttgttggaataaaatttgataacctctagtttgagaaattggcgcgaaaggatggattttcccaaattctgaccaagttacaggaatcatttctgaagttgcgtttaacttcatggtacaagaacccaaaggaatcattgatgttgttaatgataaatccttggtttctaattgatgcaaataacgcaataattccgtttctgaatgatagcggttgaagatgggatgagttaaataagtagtggtgcgaaaggtggggagacttgcactgagcgaagtcgaagtgtggggagaatttatttctgcgatggtaaaaggtaattcatctttgagagcgaaaatttgcaataaatcaattacatctgcttccgttgtcgtttcatctaaggaaattcccacatcagaattatcaaaaattcgcaagttgatatttctggcatccgcagcttctaaaattgcctgtaaactagtatttcctaactcaatccgcagtgtatcaaagaagttatgactaacagttttataacctaacttttgcaaacctgcggctaaagttgctgttaattggtggatattttgggcgatcgctctcagtccatcgggtccatgatacactccatacatccccgccatcactgccaacagtacctgcgctgtacaaatattactagtagctttatctctgcgaatatgttgctcacgggtttgtaatgctaaccgataggcaggtttaccatgaacatcttttgatacacccacaatccgccctggaactaagcgtttatactcctctttggtagcaaaataagccgcatggggtccaccgaatcccattggaataccgaagcgttgagtgcttcctactgctatatcagcccctaattcaccggggggtgtgagtaatgttaagctaagaggatctgccgcaattgtcaccaatgcaccctgagcatgggacttttctataaagtggcgatagtcgtaaattttaccgtcggttgcgggatattgcagaactgccccaaagatagtttccgaaaaatcaaaggtttgatgatcaccgataatgatattaatgcctaaaggtttagcgcgagtctccaatacatcaatagtttggggatgacacgcactagaaacaaaaaagttatgggatttattcttacagataccataactcatactcattgcttctgctgctgcggtcgcttcatctagtaaagatgcgttagcaatttctaaaccagttaagtcaataatcatggtttggaaatttaacaacgcttccaaacgtccttgagcgatttctggttgatagggggtgtatgcggtgtaccaaccgggattttctaagatgttgcgttgaatcactgctggggtgatacaatcgtaataccccataccgatgtaagaacggtaaacttgattcttttcagcgatttgttttaactttgctaatgctgcatattcgctttgtgctgctggtaattttaaatcttggttaaagcgaatagatgaaggtacggttttagcgattaaatcatctaaattagataaacctaataaattcaacatttgttgaacgtcatcagcttttggtccgatgtgtcttttagcaaactcgcttacttggttgattttagccgaaacttgaggacgtgggggattagctaccacaaattgctctccagatgtcacagtttaatatattgtaatgattactttgagggaataggaaaatagaaatatttacaccaggagtcaggagtcaggagtcaggagttatttattttggattttggattttggattttggattttggattgtttttgtcatctccaatctaaaatctaaaatctaaaatctaaaattttcctcacctgtcacctgtcacctagtttacgaaccttctaccaaagcactatactcactagctgtcatgccatcttcaacttccccaggatcattaacacgcactttgataaaccaaccatcaccataaggatcatcaactattgactcaggagagttaatcaaatcttcattgcgttctactactgtacctgtaactggtgatttcaggtcttctacagctttaacagattcaattgtaccaaatgagtctcccttggagaccccatcaccaatttctgacagatccaaaaatacaatatcacccagttgatctatagcaaactcagtaataccgatagtggctatttccccatctaaacgtacatattcatgagtatcttgatagcgtaaatcatcgggatattcaaaagccataacacttcctcttccacgttaaaaaaatggtgttaccagagtaacccaaacaacattattcctcaaaaatctcaaaacttatcagttagtaacacgattttttgagcgataaaaaggacgttttaccacgaccgcaggataagctttaccgcgtattcccacttctaactgctgtttaacggttgctaactgactggaaacataagctaaagcaatgggataaccaagggtaggtgataaagtaccacttgttacttctcccactacttcacctgatgataatacggagtagccatgacgggcaatatttcgcccttgggtttgtaaacctacgagtttacgatgtactcccccggttttttgttgttgtaaaatctcccgaccgataaaatcgctttttgtatctaaatgaaccaaccaccctaaacccgcttctaggggtgtggtgttgtcgtcgatatcttgtccataaagtgccattgctgcttctaaacgcaatgtatctctacaacccaggccacagggaatgacaccagcatcatagagactttgccacaattttatccctacttcggtatctaccatcacttcaaaaccatcttccccagtgtagcctgtacgcgcaaggaaagcgggttgaccaaaaatggttgtttctaaatgcccaaaggctttgataggggttaaatcatcggatacaaaagattgtaaaatattggtagcttttggaccttgaacagctattaagattttgtcccgtgacaggtctttaaattctacttgattcaggtcaagatgttgtaataaccatgttttgtctttgtcggtagtggctgcattaacgataatgactactttttcggtgtctgtattttctctactttggtagtaaattatgatatcatcaataattcccgcttgctcatttaacaatactgtgtattgagcttgaccgggttggagacgacttaaatcggaaggaactaatttttccagttgggaaatcaggttttgaccttggagagtaaatttacccatgtgggaaatatcgaacatccccgcagcatttctgacagcttgatgttcttgggtaataccactatattgtactggcatttcccacccaccaaagctggtaaagcgggctttgagttcaacaccgatgtgatataaaggagtttgcgctagagtttgggtagtattttctggtttagccacgggtattttctgtattttaggtattttaggtattttgggcgatcgcacattaatattcaatactgttcggttaagagtttccgtaggttaggttaagcgatagtgaaacccaaaaaaagcttatcaatgttgggtttcctaacgtcaacccaacctacataattatattttttgggcttaaccgaaaagtattgcatcaatatttacctatcttagtatcaagtcaaaagtcacgcactcaaaagttaaaaccaaaaacttctgaactcctgaactcctgtacgggcgaagtaggggcgaagcattcggaaaataacctgtgatcaaaattgataatttatcgcccgaatgcttcgcccttacaggaaaatagccttttcataaaattgataatttgtcgcccgaatgcttcgcccctacgactcctgactcctgactcctattcctaactggcaacttgggttaataattaatattgttgagatttattaagcaaaaattatgaagcgtgggcaaatttggcaaatacttgctagtgtagttttagctgtggtattgtttgtatcccccttatcggcacaagcagcaagttcttccagtattacccgttctgcgggggatgaagtacaaggtcaagatttttctggacaaaatttaataggtaaagaatttaccaacattaaattagagaatgctaactttagcaatgctgacttacggggtggagtgtttaacggtactctgttagaaggtgtaaatttacatggtgtagattttagtcaaggtattgcttatttagccaagttcaaaaatgctgatttaagtgatgcagtattgacagatgcgatgatgttgcgttcaatttttgataatgttaatgttactggtgcggactttaccaacgcggttttagatggagtagagattaaaaaactttgtgctaaagctagtggtattaattctaaaactggtgtagatactcgtgaatctttaggatgtagataggggttaaggtaggtgacaggtgacagtgaagaaagcaggggaagaaattcgagaaattggagaaaaattgagtctttattctgcctcccctgcttcccctgccatctgcctcctgactcctaaattatttgcaaagttttttccatttctaatctttgttctgcattacctaaaaaatacccatcaatcattgctgaacctaacaactttcctaattcatctcgactagtagtaatcatagtactatatgtatcatgaggcaaattacctaacatagcaacaatagatttttgaatcaattccaatacttctggtgagttaggtttagatagtcgggatactgcttctggatttaaagattgtatgtattgccaaaactgatcttgattttcttgtggtgcgaaatactcaggctgagaattggaaagattactcatggcagttactttcaactcgcttgattatcaatttatcaagatatttcgcaaataatagtcaaagaaaccgaacatcagaagatgggtttattctacagcaggaagtaaaaaatgataactacgtttgattgtgaattatatcatataataatttatgaacactactaaaaactactcgcaatctatcaaccatgaatcaaaccaataatatcagcattctggaaaagtttgtcaacacagtaatgggagtaaaaccaggaaatcaaaaacaatctctgaacacatcagcagcaacacaagaactagatatcaaagcagtaatcgtttataaactaggaactatcctgcaaatatttacaatgattctattattactaggaatggaaaaattagtaaatttgattgatagtaattctgcctttcctagttgggttagcactgtagttactgccttattttttgccttattaagtattcgttctcggattttttcacttttagataatacccgttctcgcacaacttatgatcaagtaattagaccaagatggtctcccccacctttagcatttcctatagtttggatgctgattgctgttttacgggtgatttcttctgtgttaatttggcaagaattagatcatcaattcttagtattacctttcattttatttgtgattcatttagcagttggtgatacttggaatacaatttttaccgtagaacgcagattaggtgctgctgttccagttgtgattttaggaccttggttatctgcgattattgtcacagcaatttattggcaaactgttcctttagcggcaatgattttatctttttcttgtgtgtggttaactgttgctgctgcgttggtgtttaggatttggcaattaaatggatctgaaccattgtatcctttaaagttggcatctgtggaagattagagggggaaatttaggatggcgatcgcctctggcgctgcgctccgcgcaatcgctattttttagttgatagaaaataagagcgatcgcactaatcaaaaccatttaactataactcttcaattgtcactaaaccaccttctgtaaattggatagataactcataaccatcaagtaaagcagttcccaataaaggacgctttcctgtagctaaaacattaacttctctttcctcaccattccagataatagtggcttgatgtatgggtatatctacccaactattattagctagatttgcaggtaattcatagagaaaaggtaaattcattaaagtaactgctgctgatggtaaactaagatcgcctgtaaaccctgtatcaatcacaaattcaatagtaaaatctggtttatttggcagacgaaatatcacatttacagttgctcggccatttttaataataccagttatcaccgatagtcacgctccatatcaccacagaaagaaacagcgactttataacctatgcgaagtccatataatctggctaatgggtttttactccgtaaataacgcgctgactctatccctgttttatcaactgcatattcaccagtttctatatcaataatcaccattttaccgatgttttcttcagtttcgacttgtgaacgaatgctattttcgtataattctttagcacgtttggcaacttcttcactgctgaggagaatggcttgcattttatgtcatcctttttttgtgattatgtttattatactggatttataataaaatttattcttcttcagctaaattgatatataatgaaaataaataatttttgatatcttctcatgacattacaagaattgcaaaaacaagtattacagttaccaatgagtgaacgctggcaattggtacaaactgtattagagtcaataaaagaagaatctatttcagcatcaaagaaaggtaatttatctcgactgcgtggtattgctaaaggtgtcaatatagctagggatgagaatattaatggagattatgcgaattatctaactgaaaaataccaatgaaacgaatttttatagatacgaatatcgtcctagattttttactggaacgagaaccttttgtagaagatgcagcaaggttatttgcaaaaattgatgctggtgagattgcagggtttattgctgctactacaattactaatatttattatataattcgtaaagccgcaggtgtaacagttgctcaagatgcaatttctcaaattctcacagatttacacatttgcacggttgatagaaacattttagaaacagcagtagcttgaaattttcaagattttgaggatgctgagcagtatgcttgtgctatgaaatcaatggtagatgtgattgtcactcgtgatgtgtctggatttttaggttcagaaattccagtgattttacctggggagttaaatcatatttttcaagagtaaaagcgatacattcggtaagctatgctaaagaactttctccacaattgctttataatttcattgctaaatacatcaaaactttatgaaaatgaacaaacctattgctattgatttatttgctggtgctggcggatttggtttaggttttgcgatgggaggttttaatattcccctgtctgttgaaattgatgcttgggcgtgtgatactctccgttataaccaccctgacatgaaaataattcaagatgatattcgtaattttaatactttaagtagtgttaaagaaatttgtctatacaaaccggatatagttattggtggtcctccatgtcaaggttttagtgttgcaggtccagcacgaaaagaccctaatgatcctagaaatactttattcattaacttttctcagtggataaattttcttcaacctaaagcatttgtgatggagaatgttaaaggtttactcttacgcaaaaatagcgaaggtttaaaagtcatagatattattaaacaaacttttgaagaacttggatattttgtagaagtatggttactgaattctgctgaatatggtgtaccacaagttagagagcgtgtttttattgttggaaacaaactaggtaaacaattaggtactcctcaaaaaacccattctctagacttattaaaaaataagatatggcaattatcccttgaagaaataaatttacttcctgctatcagcttatgggatgcaatatcagatttacctccacttaatgcgagagaaggtaaagaagaacaaccttatatatcagaatatcaaaatcaatatcagcactggatcagaaatggtagtaaaattctttataatcatgtagcaatggaacattctccgcgattagtagaacgttttaagcaaataaaatggggtgaatccagttcagatgttcctatagaatatggtgctaaacgtcgtagtggaaatggtgacttatctaataaaacttacgatcaaaacaatagacggttacatccatacaaaccatcacacacgatagcagcttccttttatgccaattttatccaccctttccagcatcgtaatttgactgctcgtgaaggtgcgcgtgtccaatctttccctgatacttatcgttttttaggaaagaaaactgttgtatctcataagttattacacagagaaaatagattaaatgaaaagtttctttgccagtataatcagataggtaatgctgtaccaccacttctagctcaagcaattgcaattcatcttcaagaaaaattagagctatgtccacaactgatagaaaccctttagttcatggttcaaatctcgaacaaaaagaaaatcaccgcaaaaaatatagagatgctgaaagcagaaaatttctccaagaaatcagaattgaatatgataaatggcattcagctaatattgaattagttggaccaacatcaacacctaatgaaaatgataatgcaattatttctcaaagagtagaacttttatcagcatataaggattttttagatcaacaacattatgctgaaaagtttgactctcgctccaatcttcactctagtgtattggaggaatttctctattatttatttcgagatttagcaagagattttggagaaaacgcgctcattggaaaatcccatactttcaaagatatcttctttgttcctccaaaatatgcagaaatgttgaaacgcccctatgcacgtattgaaaagaaagaccatgattttgtgattggtgcaactattgaagcatcatttgaagcagttataccaccagaagaagaaaattcaggtgaaatgctgacaattattaaagaagaaccagacaactattcagatgttacagttacaggtaatacagaaactcatatttttgatattccagtcattgtcattgaatgtaaaacctatcttgataaaactatgttagaaggttcatcaagagcagcagaagatttaaaagccagaaatccaaatagtttatatatcgtattaatgaaatggataaagttgaccagcgatgttaatcttcggaagtacaaggttgatcagatttatgtattacgtcagcagaaaaacacggatcgagaatttaggtatgaagaaacttatgttaaaaatccaattaatccaactgtagtacaacatttatttcataaggtacggaagcatttaacaatggactggactggtggaattgaacatggaataacgcgaggttggttaattgaggaatgagttttttaaaattatctccatcagcagaaataatttctatatcaaacattaactccccaacttcaccaaatttccctaaaatcatattctgccacaagcacccgtttcattaattctaaaagtcaccaaccaaccttgaggatatttttcccttgcttttttctccgatccactttcctcaacatcaataaaataatcaccactatttggttcaattaccataaaccaattgtaatgatcattgattaattcaggacgaactcgattaaaaacaacccgcgctttttctccccgcgcatttctttcagcttccctttttgctaattcttccggtggtattgtaaactctggaaaaattcttcctggttgacgacggcgtacttgttttgtattagtcataattcaccttacctcatttttatcaattgccaattattctttttactcttctttgcgcctttgctccttagcgtctttgcgcgaaacaaaaaatctactaacttacatcaattcttcagctaaaagcctaccttcaaccggttcatactcatcttccaataaccataactgagcagcttcataactattactagaaaatacaaccttatcaccctgtttaggatcataaattttacaatttccttcactatcacaaagtaataacagaatgtatggaggtgatagcatcggatctatccatacttctgtaaattcccaattattcttcactaggtcgggtgcgtaggatgacgtggtattggttgtccgcattaatttttatctccccataataaagtggaatactactaccatctggactaattctatgacctattggttcagtaaaaaacattccataacgttcataatctctaacaatgccgagaaattctccttcttctattatgcactgtgcaactaaattcatggtattttcatcattaaacacatgagcagcaattccttttttcagaagtctttgcatttgtggtgttcctggtaagtgcttggcaatatgtctaacgtcaagggtaatttgacgatttattcccctcataattgaaagtaaaaaaataaaaaacggtagagcaattaacactctaccgctttttaaagcttttaaacttgagacttaattaatcccaaatcctaactacaactcaacaccaggagtcaacaactcccgactttctctagctgtaacttggacaacaccattttcatccacatcaacgtaagcaacatcaccgtctttgatgcgtccagacagaatttcttccgccaaactatcttccaacaagcgcataattgctcgccgtaatggccttgcaccgtagctggggctgtaaccttcttgaatcaagcggtccttgaagcgatcgctcacttctaaagtaatgcctttttctgtcaaccgaccaaacacttctttgagcataatgtcggcaatttcggtaacttcagccttattcaactgacggaagacaataatttcatccaaacggttcaagaactcaggacggaagtattgcttcagttcctcattcaccaaagaacgaatccggttgtattgagattcagtttgatcctcagcaaactcgaaaccaataccgctaccgcctttttcaattaccttagaaccaatgttagaagttaaaattaacaaagtgttcttaaagtctaccgtgcgtcctttagcatcagtcaaacgaccatcttctaaaatttgcagcagcatattgaatacatcggggtgtgctttttcgatttcgtcaaacagcactacagtgtaaggacgacgacgtacagcttctgttaactgaccaccttcgttataaccaacgtaacctggaggtgaaccaatcaatttactgacggtgtgacgctccatgtactcggacatatctaagcgaatcattgcttcttctgaaccgaagaagtaagaagccaaggatttagctaactcagttttacctaccccagtcggaccagagaacacaaaactcgcaatggggcggttaggattcttcaagcccacacgagcgcgacgaatcgcacgggaaaccgctttcaccgcatcatcttgaccgatgaggcgctgatgtaaggtgtcttccatgtgcagcaacttctcagattcagattcagtgagtttgttcactggtacaccagtccaagaagcaacgatatgggcgatgtcttcttctgtaaccacaggttcaacaccatcaccaccagctgcattggttttgttttgagcaatggagcgaatttccgctttaatttccatttctctgtcgcgcagttctccagcacggtcaaagtcttgagaacgaacagcatcatctttttcttttaagatttgccgcagttccttgtctaattccttcgctgctgggggtagctgggagttaattaaacggacgcgagaaccagcttcatcaattaagtcaatagctttatctggaaggtagcgatcgctaatatatctatcagacaacttcgccgctgccactaaagcctcatcggagatttttaacttgtggtgcgcttcatagcgatcgcgcaaaccatataaaatttctattgtttcatcaacggtcggttcacccaccatcacaggctgaaaacgtctttccaacgctgcatcccgttcaatgtgcttgcggtactcatccaaagtagttgcgccgatacactgtaactcaccccgtgccaaagctggcttgaggatattcgctgcatcaatcgccccttcagcagcaccagcaccgattaaagtatgaacctcgtcaattaccaggatgacattacccgcttgacggatctcatccatgattttctttagacgttcttcaaattcaccccggtacttagttcctgcaaccagtaaaccaatatccagagttaccacccgtttatcttccaggatatccgggatatctttgttagcgatgcgactggctaaaccttcagcaatggctgttttgcccaccccgggttcaccaatcagcactggattatttttagtccggcgacccaaaatttgaatcacacgctcgatttccttggcgcgtcccaccacaggatcgagtttgttgtccacagccatttgggtcaaattcgagccaaattcatccaaagtaggggtttttgtgcgacccgaagaaccgccaggagtcacttccgcagtttctcccaacatcctaatcacttgggttctcaccttagacaaatctacacccaggttttctagcaccctggctgctacgccttccccttcacggatgagacccaacagcagatgctcggtgccaatgtagttatgccctagttggcgtgcttcttccaaggatagttctaaaacccgctttgcccgtggcgtaaacggaatttccacagccacaaagccggaaccccgacctatgattttttcaacttcaatccgggcatctttaagattgacacccattgactttagcaccttggctgccacccccgtgccttccccgatcagacccaggaggatctgctcagttcccacaaagttgtgacctaaacggcgggcctcttcttgggccagcatgattaccttaatggctttttctgtgaagcgttcaaacatggcatttttcccatcacctgcgtcgtgccggtatgctgattttagcacaggctaaaattttggatatctctatcaaaaaaatagataccccccagccatcacacaagttgatgggttcattcattaatttttattactttttctatcgctagtctggtgaggagattgaatttactagccttcctggaaattacgactaacaagacactactaatttttagattttgttaatctattcccaaacaaacttaattatcatatacaatggtacattgtcaatacaaaagtttttaatataataaatttttattaaataaaaatatttattttgaaatattgataaattgggcattgggagaggcaggaggcagaaggtaaatatttctccctatttcctatccccttcttactgtccccagtcacctattcagttaaactccaagaagatttggctaggcgatcgctaatcatcacttcccaatcatccaaatttttgagaaaactgggctgttgtaggttagaagtccacaaaattaaagcatcttcattattatcttggtaatagcgtggtcttttaccagcagtcttaaagccaaatttttcataaagcgaaattgccttttcgttagaaacccgaacttccaacgttgccctttctaaaccgcgatcgcttgctgtcttcagtagcgcatacaataaagcctgtcccaaaccttgaccctgatattcaggatgaaccgccaaaattgtaatatgcgcttcttctaaaattgaccaaaaacaacccattcccaacaaaccacaactagaaaatggggcaaataaacctaaaaaatgactattaggactttccagttctcgacggtagccctccatagtccacaacccatcaaaacaggctttatcaagttctagtagttcacttaaattctctgaagttaaggattgaatttttaaatctaatagtttcacgatgaagggaacaggggaagcaggggaagcaggggaagcaggggaagcagggggaaattatttttattttcccagtcaccagtcaccagtcaccagtcaccagtcaccagtcaccagtcaccagtcaccagtcaccagtcaccagtcaccagtcaccagtcaccagtcaccagtcaccagtcaccagtcaccagtca

SEQ ID NO: 65 - DNA, 30327 bp, Sphaerospermopsis sp. LEGE 00249
  LEGE00249_81
tgttgtttgtacccgtaaccgggttgtggatgagttcagtaggtatcgtgggtttagcattaaacctgcgggcttatgacttcgtttcccaagaattacgggcagcagaagacccagaatttgaaacattctataccaaaaacattttgttgaacgagggtatccgcgcttggatggctcctcaagatcaaccccacgaacagttcgtattcccagaggaggtactaccacgtggtaacgctctctaatagatcagttatagccggtggccgtgaccaagaatcaagcggttttgcttggtggtctggtaacgctcgtttaatcaacctatctggtaaactgctgggcgctcacgttgctcacgctggtttgattgtattctgggctggagcaatgacactatttgaagttgctcactttatcccagaaaagcccatgtatgaacagggcttaattcttctccctcacgttgccacattaggttggggcgttggtgctggtggtgaagttatcgacactttcccctactttgttgtaggtgtactgcacctaatttcttccgctgttctcggttttggcggtatctaccacgctgtacgtggtcctgaaaccttagaagaatattcttctttctttggttatgactggaaagacaagaacaagatgaccaacatcatcggcttccacctgatcatcttaggatgcggtgcgttgctgttggtactgaaggctatgttcttcggtggtgtctatgacacctgggctcccggtggtggtgacgtgcgtgtaatcactaaccccaccctcaaccctgctatcatctttggttatctcattaaagctccctttggtggcgaaggctggattatcagcgttgataacatggaagatgttatcggcggtcacatctggattgctttaatttgtatttccggtggtatttggcacatcttcaccaagccttttgcttgggcgcgtcgtgcttttatctggtctggtgaagcttacctatcctacagcttaggtgctttgtccatgatgggctttatcgcttccgtcatggtttggtataacaacaccgtttaccccagcgaattctttggtcctactggtcctgaagcttctcaagcacaagctttaaccttcttgattcgtgaccaacgcttaggtgctaacgttggttctgctcaaggtcctaccggtcttggtaaatacttgatgcgttctcctaccggtgaaatcatcttcggtggtgaaaccatgcgtttctgggatttccgtggtccttggttagagcctctccgtggtcctaacggtcttgacttagaaaaaatcaagaatgatattcagccttggcaagctcgtcgtgctgctgaatacatgactcacgctcctctgggttctttgaactctgtaggtggtgtggctactgaaatcaactccttcaactatgtatctcctcgtgcatggttggctacttctcacttcgtcttaggtttcttcttccttatcggtcacttgtggcacgcaggacgcgctcgtgctgctgctggtggttttgagagaggtattgaccgtgagaacgaaccagcttactacatgaaggatcttgactaggtttttctagttttctttcatcactgacaatcaattaattttcttgctcttgctgtcaagcgagagctttttttcgtctgtttgaaaattatacacattaaaatttaaattaaaatttgttacgtcttttatgctgtgcttgatatagctgtacacaagacggttaggacataaactaaatctcaaacttagacaatcaaaggcttttaacactatgaatactcacctgctatagtttatgtcctaatcttgatggttatagctatagtgttatgtgtaaattttttttcataaataaacaattatttatacattgctgataatatacactattacaaataaattctgtgagtagtgaaatcatgaataagttagggtttggcacatctgtactgacagtaacagccagtttagtgatgggtacatcaataaatcaagtagtgatggctaaagaagtgattgcagaatcaacaactcagccagcagttacaaatgacgtgattgctacatcaataacaccagaaacaagtgagactcgtcctcaacctggtactttttcttacgatgctgtagatttacttgccaaaagaccattagatttaaacaagttctgcaaagattaccctttaaattctcgctgcgctaatcgtcctgatccatcaacacaaccgttacaagaagctaaacctactgaggaaactagtaaaactcctgcaaaaaccagcggttgggcaatcacccctgaaattagtacactaggtgttggtgcaacagtcaccaaatctgtaacacctaatatcaatgctaaacttggaattactggtttaggtatcagcgcagatattgaagaatctgatatcagttatgatgctaaacttaacttattcaatgtttctactttagttgactaccatccttggcaaaagtccggttttcgtttgactggaggtctggtgtttcaagacaataatatcgaaggaactggtaaagccaccaatggtggtacaacaattaacataaatggaatagactatgtcatcggttctggtgacacagtaaaagccaagatttccctacctaatagcgtagcaccatatctaggtattggttggggtaatgctgtgaaatctggtaaccgctggggtttctccgctaatttgggtgtgatgtttgctggctcaccaaaagtagagttaacagcacctggttatattcccgcaggtgatgtagaggcagaaaggaaacaattggaagacgatttggactggttgagcatttatcctgttctttctctaggtctatcttaccaattttagatgaaaatttgcaggtttgattcagggctaacagctagttactgttttactaactcctgttaaccctttccccctgctctttaccaaaaagtatgactttgattgtgaacagtattttagaatccaaaaaacctgagaacattaaagataagacccaaaggacctgctacagtacctactgtatcaccagccttggcaacaccagaacggttgactaccacaacatcattattacgaagtatgggattggtttcttcgttaatgcctttggagaaatctatttttactaaccgtttagtaacagtaccattgggattgagacgaatcaaatctacagcaccactactagccctagcatcattaaagccaccagcagccagtaaagcctgatttaaagagctattcggctgtaaatttgttaatccaggttttttcacttctccgactacccctacttgaatagttgacggtgataaagtagtagtagctaattgtattgcttccgctggattaatctcagtggctgtgggaacaacaattgtatctccatcttgcaacaccacatcttgatttagatccccagtttgcaataattcccagagattgagatttaatgtttgttctgagccaattctagtaggacggcggattttaatactccgcacatccgcttgtgatgtaattcctccagctagttgaattgctcgcatgacagttggtaagcctgttcctggcgctccaccatcatttccaccaccaccacctggtgttactaaataagaaccgggacggtacacttgacctgtaatagctactgtgcggggtgcagtttgactagccgcataattggctgcaaataaattccgagcttcagcaacgttgaaatctgtggcggtgggtacaactatggtgtctccatcccgtaaggtgatatcttggggtattctgcctgtttgggtgatttctttgaggttgagagcaataacctgttcaccagaacgtccgaccttacggcgtaattgtactttagtcacatctgctgctaatgttaccccttgggctgtgctaagtgctgctaatattgtgggatattgtaaaccgggattatcgccgccgctgccctgtaaactgagagtgtaagcgcctggtcgtgttacctctccagctacaaaaatgttaatgggacgaggtgataataaattaactgaaattagcggacgtttgagaaagcgagcatatcttctagatatttcgtctgctgcctgttccgttgttaatccgagaacggatatactaccaattagaggtaggttaattgaaccaccagggggtacttgatattcacccgtatattcaggtacttcaaatatgttgacacgaatgcgatcgcctccacctaataagtagtctgtagatatgctggatgtttgtgatgctgttctttgttgcgctaggctgacggatggtaaagcaagattgacactcgttaacaaaactacagctgtagttgaatgggttaaaaatttccacaaatgtatattaagcatatttactggagaatttgagactaccatctgtaaatttctaaacatttttaaggttgactatagttaattattcaagttccctatcattcttattttcctaattaactatggttttcaggatataatctgatcctgtattctgaatttttagttaacttaatttaaattaaaactcggacagatcatctaattgttaacgattacagcaagttttttcaaattcgtcaatagtgaagaatcatattttataggatttagggaatagaagaaattttattacaagttattaccagtaattagccttacatgatttaagttacttttcagttataaaagcaagtgtttacacaatgtagggataagcatttaggaaacagaagaagttcctgaatctagtacagacgttccgtaggaacgcctgtactgaatcctgaattattactgattttgtttttggatctgttggataaagaactcttctaaagattgacgagttaagttcatagtcataattttaccacccattaatcggagactggctagaaaatcatagtaatctgcttgtaaaataccgtgccaactaccatcaggttcaaattgcaaatcaagtattcttttattcagaacttctctatcgcctccttgacctttgacatgataggtattctctgtacctaaaagttcatttagagaaccagcacaaattaattctcctttagccaagatggcaatgcgatcgcaaatttgttctacttcactcaaaacatgactgttgaaaaatattgtctttccagcttttttgagtgagagaataatttctcgcatttggtaacgtcccaagggatcaagtccagacataggctcatctaaaaataccaattctggattattaactaatgcctgagccataccaactcgttgaagcattcctttagaataacgtcgcattatctttttacgagcatcagtttgtgacaaaccgactaattctaacagttcgggaatgcgttgacgttgcaccttttgaggtatttggaataaaccagcagctaattccaaaaattcccagccggtgagatagtcgtataaatagggattttctggtaagtaaccaatacgctgtttcaccgagcgatcgccaagtggcttacctaataataatcccctgccagcagaagggcggataattcccaataaaagttttaacagagtggttttacccgcaccattaggacccaataacccaaaggtttcccctgggtaaacttgtaaagaacaacttttcaaagatacgactttttgattcagccaaaaacccgtgcgataaacttttcgcaactcagaagtcagaactactggaggctgatctacaggattcagttgaggagcggatgtgtctgcaacagaattcatcgtgtttcaattaccaattaccgactgggtgcgattgattacaagttagaaattagcacaatacatgactatattgttgtgtcaattatcgccaagagaatagctttcttacactaccatcagtaacttatagcacacctttggaactaggaatagtctcagcacgacgaggatcgatttctactgccatccgcatcgctctggcaaaggctttaaaagttgcttcaataatatgatgggaattaataccatcaagttggcgaatatgcaaggtcatttgactatgattcaccaatgccacaaaaaattcccgtaccagttgggtgtcataagttcccactcgttgagtaggaatatttagaccataactgagatgaggtctgccagaaaagtctaaagctacctgaatcaaagcttcatctaggggtgcaaggaaattaccaaagcggacaatgccttttttattacctagtgcttgatgtaaagcttgacccaaagtaatccccacatcttcattagtgtggtgatcatcaatttcccagtcacctttagcttgaatatccaaatcaaataaaccatgagaggcgatttgatggatcatgtgatctaagaaaggaatgccagtattagcgttacagatgcccgtaccatcaatgtttatggttactattacatccgtttccccagtagtacgtttaactgtagcaatgcggttagtagtcattagtcattagttattagttattagttattagttattagttattatttattagttattagtcattggtcattagttgtttttcccaatcaccaatcaccaatcaccaatcaccaatcaccaatcacctattacattcccatcatttcatatcctgcatctacatacaggatttgcccagtaataccgctggctaaatcactacagaggaaagctgctgtattgcctacttctaattgtgtaacggtgcgacgcaagggtgcaactgcctcaacgtgatgaatcatatctaaaataccgcctactgctgaagatgccaaagtgcggatgggtcctgcggaaataccattaacgcgaatattttgggaacctagttctgctgctaagtaacgaacactggcttctaatccagctttggctacacccatgatgttataattagggatagctcggactgcacctaaataggagagagtaacaatactaccgccttcagtcatcaagggtttggcagcaccgcttaactgaatcagtgaataagtgctaacttccaaagctttattaaaaccggaacgggaagtttgactaaaatctccgcttaaatcttctttgttagcaaaagcgagacagtgaatgaggatgtctaatttaccccattgatcacggacagtttcaaaagtggcttgaatttgttcctcgttttcaacgttacagggaaggaataagctaggttggagaggttcgactaattctgagacttttttctcgaatttgcctttttcatctggcaaataggtaatacccaggttagcaccagcttggtgtagttgttgagcaataccccaggcaatggagcgattattggcaatacccgtgactaaggcgtttttaccggacagattcagcatatcaatagtcaatgtgatcaatcattaggagtatagataaccatactagaatctgaccctatttttacttagttaggtaggggattttcagaattatcattcgtttgggtgttgccagcaacaaaatttatgataaagcagattgcagatcaatgaggtacagcatctaaattgaaacatagacagaaagagagttttacttctgactcctgaacggtagtttcttcacttggggagaccccaagacagcactgcctcatcctgactcctgctgtaattgtttaagaacttataaagatatggcaaatttttctgcaaaaaaacctctttagttcagtttgagaaactactgatctaccatttctaactaaaaataacaaaaattgggtatcatgatcaacaaataaagataaaatgagaaatttgagtatagtaaaaaacagaaaggttgacggtgctttattgaattttcaggtgtattcttaggtaatcagtttttgtttttccggcattgggtaggggaagggagatgatcgtgacacaagataaagccctagcaaatgtttttcgtcagatggcaactggagcatttccgccagttgtggagacgtttgaacgcaacaaaacgatcttttttcccggcgatcccgccgaacgagtttattttcttctcaagggtgctgtgaaactttccagggtatatgaagcaggagaagaaataacggtagcactgctgcgggaaaatagtgtttttggtgtgttgtcattgctaacgggtaataagtcagataggttctatcatgcagttgcctttacggcggtagaattactttctgccccaattgaacaagtagagcaagcactcaaggaaaatccagaattatcaatgttaatgctgcggggactatcttcgcggattctgcaaacagagatgatgattgaaacacttgctcaccgagatatgggttctcggttgatcagttttttgttaattctctgtcgggattttggtgtcccctgtgcagatggcattaccattgatttaaagctatcccatcaggcgatcgctgaagcaattggttctactcgtgttactgtcaccagattgcttggagatttacgcgagaaaaaaatgatctccatccacaagaaaaagattactgtgcataaacctgtcacattaagtaagcaatttacttaaaatctgttggggagaaagttggtacaagttgtattgaagttgtgttttgaaaaaaaatacccgcaatcggaggaaatttaaaaattgactaaattctgcttttgccaatcttctttcccccacagacaatggttgaaagtagtaggctgtatctggaagcatttctggcggtagttgaagatggccaccgggtacatcctgatagcagcaattttaattctggggggcgtgattgccactgtgggcgatcgcattggcactaaggtgggcaaggcacgcctctctttatttaatttgcgtcctaaaaatacagccgtattagtaacgatttttacgggtggtgtaatatcggcatcgactttagcaattttatttgctgctgatgaaggtttgcggaaaggagtgtttgagttagaggatattcaaaaagacctaagaaacaagcgagaacaattaaaaattgcggaaacccaaaaaactgaggtagaaaatcagttaattcaagctaggaaagaacaagctcaagcacagcaagatttacaaaacattaatcagtctctaaaagcggcaaatgccaaacaacagatcacccaatctcaactcaaccgcactattagccaacaagccaaaactcaagcgcaactgcaaggcactcaaagccgactgggtgaagtagtgattcagtatagacaagctataaatgaactagacaacctttatcaacagcgtcaagcattgcagacagcagtggaagagttgagggcagaacgtcagcgactgtatgctgaagctaaaaaagccattgacgaagctaagacagctatcgaaaaacgggatttagaacttgctaatcggcaagaaatgattaaacagcgagatcaaaaaatcgctcatttagataaacttattcaaaatcgcaacttagaaattaaaaaacgagaacaagtaattgctactagagaagctcggctcaaagaattagaaaatcagcaacaatatttagaacaggaagtagcaaggctagaaaaatattaccagtcttatcgtgacctgcgtttgggtaaattggccttagttcgtggtcaagttttggctgctgatgtagttcgtgtcgataaacctactgctgctggtgaagtagtagtccaaattttgcaagaagctaaccgcaatgccaacatccaattaagtgaaccaggaacaaatccgggaaatgcagaattattgcgtgttacccaagagagagttgaacaacttatcaaacaaattaaagatggtagagaatatgtagtgcgaattttttcggcgggtaattatgtcagaggagaaaaacagatagaattttttgctgatgccatgccaaatcaactggtattctccgcaggtgaggttctagctacaacctctgctgatatgaaaactatgacatcatatcaattaaggcaacgtttagacttgctgatttctgcttctcaatttcgcgcccgcaatgctggtattgtggaagcagtacaggtagatggaacttttttgcgctttttctcgcaattgcaacaatctgaacaacctttagaaattaaatctgtagctgctgagaatacctatacggcaggaccattgagaatcaaacttgtagcacttttcaatggacaaattatttttagcacatgattggggactggtgactggtgactggtgactggtgactggtgactggtgactggtgactggtgactggtgactggtgactgggaataatatcaaccattcccaattcccaattcccaattcccaattcccaattccccattcccaattcccaattcccaattcccaattccccattccccacttccctattccctgttccctatgactaatacacaacctgcaattttaggctttgatcctggtcgagataaatgtggtgtagctgtgatggggttggatcggcagttgtattttcatcaagttgtacctgcggttgaggcgatcgcacaaatttcttcactacggcaaaaataccctgtttctttaattgtcatgggggatcaaaccacggcgaaaaagtggaaacagcaactgaatcaggaattaattccctctgtaaatattgtgttagtggatgagcgttatacaactctagaagcacgcgatcgctattggcagatgttcccacctacaggactcaccaaacttttaccaaaaggtttgcgacagccaccacgaccaatagatgatattgtagccatcctgttaattgaacgctaccttaaccgcttaacttccagcagttctactgataactgactcctgactcttgactccttctatttacaattcagcccgaatagtaaaagcataatcgcctcctggttctaattggtaatcttgtttttccaaaaagcggccgagaggttctttaattaaagcgcgaccctgggaaggtttgacagatagttctccccgacggaaatgccattgaaaatgccattcaaaatcgccggcgctgacatcaccttcaagaaagccatgttgccaagattgacgggtgattctgacatgggcggtagtttctggtagacgtttagcactcactatgctgggtgtccgatgagggataaaagcgaaccatgtaggttacttaatttttatgtaccaaaaatctctgaaattgacaaattgggaattgggaatggggaattgggaattgggaattgggaatgggtaatggggaattgggaattgggtaatggttaatattattcccaatcaccagtcaccaatcaccagtcaccagtcaccagtcaccagtcaccagtcaccagtcaccagcgccaacagacatgatatctattcaaaaataatttaaaaaatcatacagcgatgcccgctgaaataaggcatcgcggattttagatttgcgattgatctctaatccaaaatctaaaatccttaatcgttgttaacgatttgtagccgcagcttctcgcgcagcagctgcttgatcagggtgtatacccaagcgtgtcaggttaattctacctttattgtcaatttcgcgcactttgacaatcacttcatcaccaacggctacttcatcttccactttaccaacacgatagtcagcaagttgagaaatgtgaatcatgccttcttttccgggcaaaaattccacaaatgcaccaataggtataatccgtgtcacacgacctatgtaaacatccccttcattgagtttacgagtcatgccttgaatgatgctctttgctctctttgctctgccttcatcgactgcggaaatggtgactgtaccattatcttcaatgtcgatttttgcaccagtttcttcggtaattcctttgatggttttaccaccgggtccaatgaccagaccaatcatttctggatcaatctttatcgtcaatagacgtggggcaaagggtgaggtttcggtgcgtggtgtgtctatggtctggagcattttctccaaaatatgtaaccgggctgctttagcttgctcaacagcttgtttgatcacgtccaacgacaaaccggatattttcatatccatttgtaaggcggtgatgcctgtatcagtacccgcaactttgaagtccatgtcccctaagaagtcttcaatgccttgaatatcggtgagaacgcgcacttcgtcgccttctttaatcaagcccattgctgcaccggtgacaggtttgataataggtacacccgcatccataagggcaagggtagaaccacagacagaacccattgaggtagaaccgttggaagaaagcacttctgatactacgcggatgacgtaggggaattgttctttaggcggtagtacgggtaaaatcgctctttcggctaaagcaccatgacctatttctcgtcttcctggcgcacgcatgggtttggtttcaccgacggagaagggtgggaaattgtaatgatgcaggtaacgtttagattgatctatttgcagatcatcattgagattttgagcatctcctggtgtacccagggtacaagcagataacacctgagttagtccccggttaaataatccactgccatgtacacgacggggtaaaactccgacttggcaagatataggacggacttcatctaatttacgaccatcaacgcgcacgttatcctcaacgatttgacggcgcataaaatatttggtgatatccttaaaggtattaccaagggctttgctatcggctgtagcagctacacgaatgggatcttctgcgggtaaggcttctatttccgctttgatttcatccttaactgcatctaaagctgtatcacgctcgtttttggttaactcaaattgagccaagatttttttaatttctgcactggcgcgatcgcggatatagttttctaatgtttgatctacttccggtggctcttcttggacgagttttaaacccagttcttcaactaaatctagctgtgcttggattaaatcccgcactgcttcgtaaccaaaatcaatggcctcgatgatatctcgctctggtaactgatttgctccggcttccaccatgatcacaccatcaggtgaaccagcaactactaaatccaaatcacccgcttcaatttccgcataggtggggttaataatgaaatcatcacctactaaacctacccgcactgctgccattggtccattaaaaggaatttgggcaataagagtagcgatagaagcgccagttacagctaacacatctggcggtacttgttcatccattgacagggtgaaagcaataatttgcaaatcatcccgtaaccatgaaggaaacaaaggacgcaaaggacggtcaatcagacggctagttaaaatcgctttttcaggtggacgaccttcacggcgcatgataccaccagggattcttcctgctgcatacagtctttcttcataatctaccgtcaggggaagaaaatcaacgccttctctggcttctgaccttgtagctgtcactaaaacagcagtatcccccgattctatcaacaccgacccacccgcttggggggctaacagtcctaccttcagtcgaatatcccgtccatcaaaggatattgacttctcaaattctgccattcagttttttttccttctatgcacgctattctctctctgtggcaatcctaacatttatgctatatagacggcttcttttagatatattagtttcatagactagattcaaagggcaggtgactggggactggggactggggactggggacctcacaggggtaggtttttaatattatctgttgaggcaggacctggaagacaaggaggtattgtagacaaggaagattttatacaaaacaaggtctgtttagcctcagtttttgttaccaattgtacattcttgttacgtatttcctcccttgtcaccttgtctgctttgtcctccaagtcttgccctcacgacaatgtaaaatacctacccttgtgagggactggggacaggtgacaggtgacagtaagaaaaaataggagttaaggagttacattgaattgttgaatagtccgatataaattctcaaatataatttttttttacatagcagtatgcacttgcatgaaatataaaatttacacaaaaaatcatacaatacaatacttcaagtctgttccctgttccctgttccctgtttcctattccctattatttccgtacaacaattagcatctgagaaatatggcaattctacacggtatttggttaaataaagaacaaaattatactgataattgtttatttatttggggagaaacttggcgaagttcccagattaatctggaatctattaccgccgatgaaataccacttaatcccttggcaatgacaccaacggatttgagggaatggttagcagtaaataatttagaaattcctaattatattccacatattcaaaatattcaaaatattcaaaatattcaaacatctccagttgctgttaatccaatcaaaggacgtaaaacagcacataaaacagaaaagactttaccaacatactcaccaattattgctttaccaactaattttatagaaacagaatctgctatttctcccataaattctgctagtttagagattgagaaaaattcacaaaaatacttacaaccttggaaaattgaaggtttttgtctcccacccagtgctgccattaaatttctctcaaatttacccttgagttcaacagataataaagatgcttttttaggtggagatttgcgtttttggttacaaatggcgcgatggagtttagatttaattgcccgttgtaagtttttaccgaatattatagaaaatccagataattctctagttggtaaatggcaggtacttttagatagtgctatagatgctactcgtttagaaaaatttgcggcgaaaatgccgttagtttgtcgtacttatcaaccagatagagaagattttagcagtaaattagccgttgctttacctggagaaccgcaaggattaattttggcatttctcaataatatcatagatgcccaaattcgagaaatggttggttctcaatctcccattgataatagattaatgatgtccttaccatctgcggtacagcagtggttacagtccttaacgagtgcatcaaatcaaggattaaatcaaattaatgctgatgcaatgggagtagaaagattagaatcatccctaaaagcatggactttacctttacaatatcaattaacaggaaaagctgcatttagaacttgttttcaactccatcccccagcagcagaaacaacagattggaagttagcttattttctccaagcagcggatgattcagaatttttaatagatgctaatactatttggagtcatccagtaaaaacattagtttatcaacatcgtcaaattgaacaaccacaggaaacatttttgcggggtttgggtttagcttctcgattatatcccgtgattgcgcctagtttagaaacagaatctcctgaattttgtcacctcactcctatgcaagcttatgaatttattaaaactgtaacttggagattagaagatagcggtttaggggtaattttaccaccaagtttagcaaatcgtgaaggttgggctaatcgtttaggtttgaaaattaatgctgaacctcccaagcaaaaatcaggacgtttggggttacaaagtttgttaaactttcaatggcaattagcaattggtggacagacaatttctaaagctgagtttgataaactggtagctttaaatagtcctttagtagaaattaacggtgaatgggtagaactaagaaaccaagatattaaaactgcccaaaacttttttacatctcgtaaagaacaattatctttatctttagaagatgctttaagaattagtaccggtgatactcaagtgattgaaaaattacctgttgtgagttttgatgcttccggcgcattgcaagaattagtagggactttaactaataatcaagatattcaacctttaccaacacctgacaattttcaaggtaaattacgaccttatcaagaacggggtgcagcttggttagcatttttagaaagatggggtttaggtgcttgtttagcggatgatatgggactaggaaaatcggtacaatttattgtttttctcctgcatctcaaagaacaagacgcattagaaaacccgacgcttttagtatgtcccacttcggttttaggaaattgggcaaaagaagttaaaaaatttgcccctaaattgaaagttttagaatatcatggtgataaacgcccgaaaggtaaaagttttacggcaatagtaaataaatacgatttagtaattactagctattcattggtacagcgagatattaatttattaaaaaccatgaattggcaaatagttgttttagatgaagcccaaaatatcaaaaatgctgattctaaacaatctcaagctgtgcgaaaattggacactacatttagaattgctttaaccggaacacctgtagaaaatagattgcaggaattatggtctattttagattttctcaatcctggttatttgggtaataaacaatttttccaaagacgttttgccatgcctattgaaaagtatggtgatactgcttctttaggacaattgcggtctttagtacaaccttttattttacgacgtttgaaaactgataaatcaattattcaagacttgccagaaaagcaagaaatgactgtattttgtggtttaactgcggaacaaggacaactatatcaacagttagtagatgaatctttagtggaaattgaatcagcagcaggtttacaacgtcggggtatgattttaggtttgttggtgaaactcaaacaaatttgtaatcatccagcacaatttttaaaagagtcaaatttagcaaaacatcattctgcaaaattacaacgtctagaagaaatgttagaagaagttgtggcagaagaaaaccgggctttaatttttactcagtttgccgaatggggtaaattattaaaaccctatttagaaaaacgtttaggcagagaaattttctttttatatggtagcaccagtaaaaaacaacgggaagaaatgattgatcgttttcaacatgacccccaaggaccaccaattatgattttgtctttaaaagctggtggtgtgggtttaaatttaaccagggcaaatcatgtatttcattttgatagatggtggaatcctgcggtggaaaatcaagctacagatcgagtttttagaattggacaaactaagaatgtacaggttcataaatttgtgtgtactggaactttagaagagaaaattaatgagatgattgaaagtaagaaacaattagcagaacaggtggttggtgctggtgaagaatggttaacagaacttgatacagatcaattacgtgatttattattattggacagaaatgcgataattgatgaagatgaggaataggagttgtaggggcaaaccccccgtggttgcccctacaggagtcagttatgtacctgaaagattgaaggacaaagaataaaaagaaacagatgtagaggccaaaagttaaagcagaatgtttaaggttgttagtaaccttaaagttaaaccctgccaaaatgcaattaatatcaggtttcattgacacatacttgagattaaataaaatagaaaaagagaaatttcaaacagaactaggtacattaataacagaggaaaaggaggaagttatgcaaattgttaccagttggatggaagaaggaattgaaagaggcattgaaagagaaaaaaatttaatcatccgtcaaattaatagaaaattgggacaaattaatctagagttagaaaccaaaattagaagtttaaacatagaaattatggaatctttgggagaggcaatatttgatttagagacagtggcagatttgcaacagtggttagataatctttaatctcaggacttacgcaaaaccagggtgagcgtgtctcaaactctattgacaggggaattacagagactaacattgttctggtaaaatcggggcaacaatccgttgatttccttcccagttatagatatgtacctcagcacaagattgaactcgctctaagttcaatgtccagtaaaatgtttttcctaaaattgctaatgtgcgtaaaccttctggtgcttcatgcagttttgtttcatcatcaacatatttatctagttgttggggaggaatacctgtgcggacaatgacaatttcattcttcatattttttgatttttttttttgatttttttttttgatttttttgatttaaaatttataaatcatggaaatattcaaaagcttctttaattaatgacaatttattttcaggacattgataaactcttggttttccttcagaactacgtttagatggtttaagtggaagtcctaactgttcttttgcatgagcaatccaacaggtttttactgttacctgatgtttatttttaatgtaatcctggatttgtttataagtagtcatatttgacaattcccagatttataagcggtttccaattcattaggagaaggcgggtaaatagcgaaccagtcaaagttaaaaacatcttcacgttcagcatgaatattatttgtagtaatcaaaccatttcctggcagtccagttgtttgattaactactataactgttaagggtggaagtttattttgctgacaataatacatgatgtgtcccaatatgggagctaaagtccctgaaccttgaaaaccaagaatttcagctaacattttataggttaaagtttggcggttcactgctttgctgatcaaaatttgccatatttgtaaggcacgttttggatgcgttgggttttcgttaaaggttttgtacatttatttgctataaaaagtacactctaaaaaaatacaggtaatagcttgtcagttaaaataataattctatctaagtgcagttgtaaatatttttctagattaagtgatcacaacaattgagttaaactagaaagcgagaaaatacacaaaaaattgcttacaccacgctatgctatcaagcagcaagggtgttttacctcctgccccctgccttctgccttctccaaaatacgatatttgctatacaatgcagcgaaagttcaataataattcagttatcaccaattggctaacaacctgattgatgatagctaatattagattaaccaaaagcggataaggatttcataacatgggtaatttaaggcgcgtaccagtaggcattgttggcgcgtcaggttatggcggagtgcaacttgtcagactcctgatggatcatccagaagtagaagtagtatatttaggtggcgaaagcagcgccgggaaaacatttacggatctttatccccatttggggagtgtagttcaactcaacattgaagcggtagatccagaagtgattgctagtagatgtgaagtagtatttctatctttacccaacggtttagcctgtgacattgcacccaaactgatagaaaaaggctgtaaagtattagatttgagtgccgactatcgtttcagtgagttaaaaacttatacaacttggtatggaacagaaagaagcgatcgcactatagctgaaacagcagtttatggtttaccagaattgtaccgcgatcgcattgccgaaaccaatctcatcggttgtcctggttgctatcccacagccagtttactcgcacttgccccactgctgaaacaaggtttaattataccagaaacagcgatcattgatgctaaatctgggacatctggaggaggaagacaaggtaaaattaacctgttgttagcggaagctgataactccctagctgcgtataacgtcgcccgtcaccgtcacaccccagaaattgagcaaatttgcagtgatttagccggacacgaagttacagtacaatttacacctcatttaatcccaatggtgaggggaatattagccaccgtttacgccaccttgcgagatccgggtttagtgcgtgatgatttaattacaatttacactgcattttaccgtaattccccttgggtgaaaatctgtaatagcggcacttatccccaaactaaatgggcgtgtggaagtaactcctgttatataggtatagaagttgacccacgaacccggcgagtgatcgtcatgtcagccattgacaacctgatcaaaggacaagcaggacaagccattcaatgtatgaacattatgatgggttgggatgaaaccttgggtttacccaaagttgggttttatccatagtaggttgatttgaggaacgaaacccaacatttatcaagttttgttgggtttcactttgtaccgactaatgtaattttaatccagagcaatatcgccttattcttaaacttttcatccactatcataaaataatggaagcacaagccagggagattaaaaactacctgaaaattgatggcaaaagtccttttgaagattggtattattctctacgagataggaaagcaagacaaaaaattcaattaagactggatcgcgttaaactaggtaatctgggagattatcgttcagtaggagcaggtgtatttgaatttaaaattgattatggtccaggatatcgagtttattttggacagttaggaacaacaattgtacttcttctctgtggtggagataaaagcacccaagaacaagatattgctaaagctaaggagtatttgttagactatgaaaaacgtgaaaataccaaccagtagaaactatcaggaatttctcattgaatctctgaaaaactctgaagaagctgcaagttatctagaaatagttttagaagaaggaagtgatgaaccattactactgcaaaatgccatatctaatgtagtagaagcttatgctaaaatgaatcatatttctgattcaactaaacagcaatatgagaaacttcagaacatccttaaacaaagcaattgtgctgaaatttatgctttcctagaattactaaataccataggttttcaaatttctatcacacctaaatcaaattcaccttatcagtcctaaaatcttctttggttgaggcaagaaatagggaacaggaggcaagagtttttttattttagattttggattttggattgttttgttaactccaatctaaaatctaaaatctaaaattttttcccagtccccagtccccagtccccaatcacctacttaggtcctaaaccaactttacctgcatagatagcgcgatcgcctaattcatcttcaattctcagtaagcgattgtatttagccacccgttcactacgacagagagaaccggttttaatttgtccagcgcgagttgctactgctaaatctgcaatggttgtatcttcggtttcaccggaacgatggctaataacggaacggaaaccgttgcgtgtagctaaatcaatggtttccaaagtttcagttagtgaaccgatttgatttaacttaatcaaaatcgagttaccggctttttgttcgatgcctttttgtaagcgggtggcgttggttacaaacaaatcatcaccaactaactgcaccttagaaccgactttctgagttagtaattgccagttttgccaatcttcctcatgtaaaccatcttcaatggaaacaataggatattgatccaccaactgccctaaataatcaataaactcaacggggctatggggtttaccatcataaacatattgcccatctttgtaaaattcactagcagctacgtctaaagctaaagccacttgttcaccgggtttgtaaccagctttttcaatggctgctactagcaattctaacgccacttggttagattctaggttaggagcaaaaccaccttcatcacccacaccagtcagcaaacctttctcatccaaaactttgctgagagtggcaaaaacttccgcaccccaacgcaaagcttctttaaaagaaggcgcaccgatagggacaatcataaactcttgaaagtctacattattggcagcgtgcgccccaccgttgatcacgttcatcaaaggtacaggcagcaagtttgctaaaggtccacccaaataacgataaaggggaatatctaacgctgctgcacctgctttagctgctgctaaagaaattcctaaaatcgcattcgcgcctaaattagctttgttaggtgaaccatctgtagcaatcatagtccggtctaacaactcttggttgagaacatccaaccctaataatttgggcgctaatatctcattggcattttttaccgccgtgaggactcctttaccaccataacggcttttatcgccatctcgcagttcatgtgcttcaaatgtacctgtagaagcaccgctaggaacttgtgctagtccgactgcaccaccagctaaatgtacttctgcttctagggtaggtctaccccgtgagtcgaggatttcgcgggctacaatggcttcaatggcggtgtctagatatttggtcattcctgctttctccttatgtttgatggttaagactttccagtttagtcctaaaccaatcgttagtttatgcgtttttaacggaaaattgggtgagattaaagaagatttccgagtttgagtcaactcaaaggaaagattaattttttttaagcctttaaccgtatagttgcccaagaagacagacagttgtatattatatgaatgtaaaaaatagtataaatactttcagtaacaatgcttgaacgctgacaatatccatagtcaagttaatgttacagcaaatcttagttgctagtaagcataaaaacgcaattaacatagaatagcctatgacttgtttggagtagctttgatattcattgtcccaattgcggtatggcatttgcagataaaccgtgaaatttgcagataaacagatttttgacatctgacgcatcctagtaagtgctgtgttttaagccacagaaaaatctgtaaactgccgatattcaggacgaataaaccctaaaataatatcatcctttcctactcctaattccaatagttccctagtgatccccccttctgtaccatcccattcaatgcagattttaccatcaataattcgcaaatgaaacaccactgcatgaaccctacctgtttgatcccaacctgtatccattaacaaataattatcagattcttgatcacaaatacataaagcctcaattttgccatgactaggtttatacttagcgtgatttccgacaacactaattataatttttctgtatttttctaacttatccattgtacaattacctccagaattggatcaaaaataatgtaattaatctgctgttgatcacttaaaatatcttgaatagctggtttgagaaaaaaatcttgataagcagcttcaggaattgctaaatataatttatgttctggattaatcctttttattaaactaacataaatattgtattgtcctagagttttttctaattctgaaattaaagaaggactgttaaaaaccttgatttcaattactatcttttgctgcatcttttgggctgcaaataacttttctgctcccaaatcagcgtataaacgcaaacctttatattctaatataaatggatcatcagtaattgtccatccatctttagtgagggcatttttaacttgattatgaaataaatcgtactgtggcattactaaatcaaaaatatcaactttagcttaccttttcagtttagtgctaaaccaaccgttagtttatgcgtttttaacggaaaattggctgagattaaagaagttttccattgatgcgggaggttgatgtgtaaggttgcttttgtgtaagtattctttgaggaatgtttcacgcaatctccgtcaggagatcccgcagggtagacgcaaaggaagaaagaatttaatttagggtgttgtttaaatacataaaaactcctacaataacaagattgcagattgttttcaaattacacaagtgttaatgatgctaactctctatttcgggaataaataatataatcttattgttcaaaagtttaatgattgaaaatacataactatttaaaattcttcctttatattttcttaatatttaattgagaattatttttatttatcaacggtattgcaatattttcaggcatctggtatgatttaagagaatttgtaatttgccttattgtgcctattttcaagacagggttttaagcagcagattgaaaaccctcactggtaagagtttccgaacacacaaaaataagaacctgcaaaaaagccagtgatttatcaaaaattcctgacatgagattcaactattttgatgctgttattagcagcttaggaatcagggggattgacaaaaaagattgaatatggtaagtgagttgcgttaggaagatgaagcgatcgctattttgatagaaaaatggatcgagtggaaagggcgatcgctatatctgctatatggctatttttagatataatatgttagaaaatctcaggattatttatgaataaagaaagtattacagcgataattcatacaggtgatgattgtggttatgttgctgaatgtgtagaaattgcggttgttactcagggggatagtttagatgaagttgtcagaaatttgactgaagcagtttctctacatttggaaggggaaaatccagaggagtttggattaattgaacatcctgctattcgctttgtttttgaagtacaaccgatttatgcctaagttacgcagattatcagcagaggaaattattgatattttgaatcaatttggttttgaaattatcagtcaaaaaggtagtcatattaaattgagaagattaggagaaaatggaaaagagacattaacagtacctaatcataagcagttagatttaggcacttgtcgggcaatttatcgccaagctagtaaatatatttctgagtcagatttacatgatcatttttatgaataaaatagcgttagcgaagcttaccgaaggtatcgcactgatgaagtcaatgtggctagagttggaaaggcgatcgctataaatcgctataagtagttaggcgttaaaaattgtccttacgacaaataaggagctagaaaacataagggaaaataagtttatataaatttattttttgttacatactatttgtaattatttatggtatagtatcacaaaacaagtaataattaatagttaaaccgttacataaaatgaacaatatgaattttcataaaatccaaccaagagaatcattaaataaagcctttctcaaagttaaacccaacagaaatgacattgagaacttcaaaaagaacctacaaaatttaattgataaaatcaacgaatctgaatcagaagagtttcataaaaatctgattggtgattttttaaaaaacacatattacagcaccaatcattttataaacaccaaaggaagaaatgatttagtgattcataatggtaaagacgctaaaactactgttggtgtaattttagaatttaagaaaccaacaaataaaagcgaaatgctcaaagttgataatttaaacaccaaagcatttcaagaattagttttatattttctgcgggaacgtttgacagctaaaaatttagaaattaaatatttaatagcgactaatatttatgaatggttcatttttgatgctaatatatttgagaaagcatttatagaaaataaaaccctggttcagcaatttacagattttgaagctggaagattaagcaataaaaaaaccgacttcttttataaagaaattgctaaacctaccattgatgaaattgccgataaaatcacctttacacatttagatattcgagagtatcagcaatatttaaaccctggtgaacatccagatgaacataagttaatttccctgtttaagctattttctccagaacatttattaaaattaccttttgcaaatgatagcaataccctagacaaaggtttttacagtgaattattacatattatcggtttggtagaaactaaagaaggtagtaaaaaactgattcaacggaaaaaagaacctgaaagaaacgttggttcattaatagaaaatgccattattcaactcgatagtttagataaaatttctcggttagagaaaccagaacaatttggagaaacttaccaagaacaacttttcaatctgggtttagaattagcaattacttggattaatagaatcctatttttgaaattattagaagcgcaattaattaaatatcataaaaatgatttatcctttggatttttgaatttacaaaaagttaagaattatgatgatctcaatagtctattttttagcgttttagcacgtaaaccacaggaaagaagccagaaattacaaacaatatttgctcatgttccttatttaaacagttctttgtttgaacttacagaccttgaacaagatactattgtaattagcaatttaggaaatgagaaattaccgatttttacaggtactatcttaaaagatagtaatggaaaaaaactgactggtgaaattaatgctttagaatatctatttgaatttctcaatgcttatgattttagtagtgaaactggggaagaaattcaggaagaaaataaaagattaattaatgctgctgtactgggtttaatctttgagaaaattaacggttataaagatggttctttctttactcctggttttattactatgtatatgtgtcgagaaaccattagaagagcggttatccaaaagtttaatgatattaaaggttggaattgtgaaactattgatgatttatatgataaaatagaggataaaaaagcagctaatgatattattaacagtttgaaaatatgtgatcctgctgtgggttcaggacattttttagtttcagctttgaatgaaattattgcaatcaaaagcgaactaaaaattttacttgatagggaaggtaaaagattaaaggaatatcaaatagaagttgtcaacgatgagttaattattaccgatgaagatggtttattatttgaatataatcccaaaaataaggaaagtcagcgagtacaagaaactctgtttcatgaaaaacaaataattattgaaacctgtttatttggtgtggatattaaccccaattctgtcaaaatatgtcggttgcggttatggattgaacttttgaaaaatgcttattataaaaccgcaagtaattatactgaactggaaactttaccgaatattgatattaatattaaatgtggtaattctttaattagtcgttttgcgttagatgctgatttgcgagttgctttaaatagaagtaaatgcagtattgaaatttatagaaatgctgtacaaacttaccgcaatgctgaaaatagagaacaaaagcgggaaatgacaaggttaattaatgatattaaaggtaatttaaagacaactttgggattaagtgatcctaataaaactaagttaagaaagttacagggtgaagttgagaatttagaaaatcaaacttctttgtttgaggaaactaaagctgaaaaaaaagcacgggagaaaaaaattgctaagttaaataatgagattgataagttacgagttgagattgaagatatagaaagtgggaagatttatgataatgcttttgagtggaggtttgaatttcctgaagttttgaataatgatggtgtttttgttggttttgatgtcgttattggtaatcctccttacttttcactatctaaaattaaagataaatatcaaattgcttattttgaaaataaatatcaaacttatacaaaaggttcggatatttattgtttgttttatgaacaaggaaattgcattttaaggaaacaaggatttttaaattatatcacgtctaattcttggttaaagacgatttatggtgatgctttgaaaaaatattttagggaaaatatgcaacctaagactttattaaatattgaagatattcagatttttgaagaagcaactgtagaatcaaatattatacttcttaaaaaagatcaactaaatgaatgttttaatgtagctagtttaatgagtaattatatatttggttcttccttagatgaatatttcattaacaactgttttgaatttaaaatacctaatacatcagaatggattataggaaatgaaaaagttggagaattaaaacaaaaaatagaacaaattgctaaaaaattaaaggattttaaaattacaataaattttggtattaaaacaggatataatgctgcttttattattaacgaagaaactagaaataaattaatttctgaagatgaaaaatcatcagaaataattaaaccaattttaagaggtagagatttaaaaaaatatagttattatttttctggatcatacttaattaatacacataatggaatcataaaaagtcatattgagagaattaaagctgaagaaaattatccatctatttataattatttaagttcttttattcctgatattgaacagcgacaagacaaaggtaaacattggacaaatttaagaaattgtgcttatttagaagattttgaaaaacctaaaatagtttggggtgaaatatctgatcaacctaaatttgcttttgatgattctaactattacgctgaagctactacttttttgatgactggtgaaaaacttaaatatttattagcaattttaaattcccaactatcagcatggtattttaatcaaatttccactactacaggaatgggtacaaacagatggaaaaaatataaaattgaaatgttacctattaaagaacctacagaaattgaagaattatcactagaaaaaatagttgatcaaattctcatagctaaaaaagcagatccgaatgcagatacaagcgcattagaagcagaaattgatcaaatggtttatcaactttataatttaacagcagaggaaattaaaattatcgaaagttctagataatatcaccttatccatatccccaacttctgatattaattaatttttgtaggttgggttaagcaacaacccaacagatgtttaacaatgttgggtttcctaacgtcaacccaacctacgcaatatctgattctgacaatttaagactaaaattaaatggtgtccgaacaaattataagatttgtaaaaaaacaagctaaatttatctgtaaatattactgaataatttagctttggttaaactaaatttaatcaatatcaagatgtgaaaaaatgaacttattaaaattaccttttgcaaatgatagcaataccctagacaaaggattttatagcgaactattacatattatcggtttaacggaaattaaagaaggtagtaaaaaactgattcaacggaaaaaagaacctgaaagaaacgttggttcattaatagaaaatgccattattcaactcgatagtttagataaaatttctcggttagagaaaccagaacaatttggagaaacttaccaagaacaacttttcaatctgggtttagaattagcaattacttggattaatagaatcctatttttgaaattattagaagcgcaattaattaaatatcatgaaaatgatctatcttacggatttttgaacttacagaaagtcagaaattatgatgatctgaatagtcttttcttcagcgtattagctcgtaaacaccacgaaagaaatcaaaccgtacaaaaaagcttttctcatgttccttatttgaatagttctctatttgaaccgacggatattgaacaagtaactatttttatcaataatctcagaaatgagaacttacaaattttctcttctaccattttaaaagatagtaatggaaaaaaacgcactggtgaaattaatactttagaatatctatttgaatttctcaatgcttatgattttagtagtgaaactggggaagaaattcaggaagaaaataaaagattaattaatgctgctgtactgggtttaatctttgagaaaattaa

SEQ ID NO: 66 - DNA, 30235 bp, Sphaerospermopsis sp. LEGE 00249
  LEGE00249_82
gggcgaagcatttgcgatatctagatgtctgatttttccgttacattatcgcccaaatgcttcgcccctacggttaaaatatgttctgggaaaatgacaatctccagaaaagatattatggaacttatttatgggggcagggcgaagcatttgcgatatctagatgtctgatttttccgttacattatcgcccaaatgcttcgcccctacggttaaaatatgttctgggaaaatgacaatctccagaaaagatattatggaacttatttatgggggcagggcgaagcatttgcgatatctagatgtctgatttttccgttacattatcgcccaaatgcttcgcccctacgattaaaatatgttctgggaaaatgacaatctccagaaaagatattatggaacttatttatgggggcagggcgaagcatttgcgatatctagatgtctgatttttccgttacattatcgcccaaatgcttcgcccctacggttaaaatatgttctgggaaaatgacagcaacttatccagcaaactatttgctaaatccagtaaatcaagatcacaaatatgaagataacgcgctagaatatcgctaatagctaatattttttgatcttccctagaaatccgcacacattcttctaaatctacagctaaatcaaacagtggcctatctcgtaaacgatacctaatttttactgctatatcatcattacttactaaaaattctttaatagtatctaataaagaatgattcaatatttcatcatcatcccatgtttctaaccaatctccatcggcatcttcaacataaagatgtacataatttactccatattctaaccagtcttgttgcattctgcgggctgctgctaaaatttcagcaaattcatctacttgagtaatgctgttcatttctttttggttaagcataaatgctgataaatgctgtcgtaaacaggtaacgatttaggcaaggactcaggtgttcaatatcaacaattggatatcaggaaaagttgacatactttccttgggacagatgatcactgttgtacagcgccacatttactaactggttgataaaatcattttcgccaggattgtaacttaaaaacaatcctcgctctatttcccacatttgcagggcattttgccacttttcatatttttgaccatgaaattctttactaacactggtgatttgaatacaaagtggtttgtgttgatgattactaacgattaaatctgtcgccatagaaaggtcagcaatataacgctgccaaacattcccttcacgacgcacaatatcttgggctattgatttaatcatatcatcatccaactgattaaactcccctgccatcatttttttcttccaaatataaaatttggcatctgttgagttgatccacttaggaaataaataaccataccaatacctttcattggctgtcatttgctcaaattttgcttgtctggctgcttcggaaggtaatgatttaattagtagccaaattgtagagtctgtaattacctctaggagaaacgcaagcacataaggtttagcagtcagggaaccagggcgagtatatttaacccaacgattgatctcatttaatcttttggctaactgaggatctattgttgcggctctctcgcttaataactttagtttatcctttatttcttttgcttgcaaactacgccctacttttgagtcactaaattaaataaacattttgttttcaatttatacctgggaacagatgtatatgattcatgttttggtgtatttggtgttaaagtttggtttttggtaaagttttggtaaagttttggtaaagttttggtaaagttttggtaaagtttacttaattaaagaaagattgtattgacatttttggacaaaggttgtattcgccaaaatttgaggatttcacaactgccacagtagttagtatactatcttttggtttcagtctctaccactctggttgtttattttctgcaactggggatacacttttttatttgctgatacttttctatcttatcctgtttcccggtacaagatgtactgtttttctttccctcaatcatacttaatattttctttaggttttatctgctcagtggcttatttttgcttatttatgacttttgtcaactgggttactgggatctctacttctagttctgtctaaaatgtagaaattatatgataacgaaccgcaaaggacgcaaagtacacaaagaaggaataaaatgggatatcacacaatttgataattctgtgatagacagttggattcatctagcttaatgaaaatctaaataatatttgccaaaactttgctaacaatagttttcagtcacaatactgtttacataattcatcatgtctcaaccgacgatagaatctatcctacaggaaaagcgtctgtttcatccagctagtgatttttcccaaaaagctcaaatcaaaagtttggaagattatcagcgtctttatgatactgcaaaagctgaccctgagaaattttgggcagatttagcggaaaatgagttacattggtttgaaaaatgggattctgtgttagattggcaacctccttttgcgaagtggtttgtcaatggcaagattaatatttcttataactgtcttgatagacatttaacgacttggcgtaaaaacaaagcggctttgatttgggaaggtgaaccgggagattctcgcacgctaacttatgctcagttacatcgtgaagtttgtcaatttgctaatgtgctgaaacagttgggtgtgaacaagggcgatcgcgtggggatttatatgcccatgataccggaagctgctattgctatgttagcctgtgcgagaataggcgcacctcatagcgttgtttttgggggttttagtgcggaagctttgcgcgatcgcttaaatgatgctcaagcaaaagtagtagttactgctgatggtggttggcgtaaggatgcaattgtaccgcttaaagaacaggtagataaagctttagcagataacgccgcacccagtgttacagatgtcttagttgttaaacgcactggtcaaaaagttcacattgaaccaggtagagatcactggtggcatgatttacaacaaggtgtatccgctgactgtccggctgaaccaatggacagcgaagatatgttatttgtgctttatacctccggtagtacgggtaaacccaagggggtagtacacactacaggcggttataacctatacagtcatattaccacaaaatggatttttgatttacaggacacagatgtatattggtgtactgctgatgtcggttggattacgggacatagctatattgtttatggtcctctttccaatggtgcaactactgtaatgtatgaaggtgcgccccgtgcatctaatcttggttgtttctgggatgtgattgaaaaatacggagtaacgattttttatactgctcctaccgctatccgcgcctttatcaaaatgggtgaacaccatcctaaatcccgcaatctttcatccttgcggttgttgggtactgtcggtgaacctatcaacccggaagcttggatatggtatcataaagtgattggtggtgaacgttgccccatcgttgatacttggtggcaaacggaaactggtggtgttatgattacacctttacccggtgcaattcctactaaacccggctccgctacccgtcctttccctggtattattgcggatattgtggatttagaaggtaacacagttcccgacaatgaaggtggttatttagctgtacgtcatccttggccgggaatgatgcggactgtgtacggtgatcctgagcgtttccgtcgcacttattgggaacatattccgcccaaagatggtaaatatacgtactttgccggtgatggtgcaagaaaggatgaagatggctatttctgggtcatgggtcgtgtggatgacgtgctaaatgtgtctggacaccgcttagggactatggaagtagaatctgcgttagtgtctcatcctgcggttgctgaggctgcggtggtgggtaaacctgatgagttgaagggtgaagaagttgtagcttttgtgactttagagggaacttatcaacccagtgaggagttgagtaaggaactgaaaaagcacgttgttcaggaaattggtgcgatcgctcgtcctggggaaattaagtttactgatgcactgccaaaaacgcgatcgggtaaaattatgcgtcggttgttgcggaatttggctgcgggtcaggaggtatcgggggatacttcgactcttgaggatcgcagtgttttggataagttgcgggaaggtgcttagtttgaattaagctcacgcagagacgcagaggcgcagagaggtgaattaatatggggtgggcaattttgcttaccctatattttgggaagcaaattataactgaattaagatagggatatatataacataatgagggatgcactcggacaaagaggtgagaggatatttgaagttttaatcactaaatttcactctgatgatggtcccatttttaagcctcagtttttaggagataaatggcagtatgttgattttattgttgagttagtaggtgctggttgttatattccttatttttttgtccaagtcaaaactaccagacaaggttatactaagaaagataaacgtttaaaggtgcaagtaaaaaaggaatctgtacttggtatagcatcttatccagcaccaacttatatagttggaattgatgaagttcaagaagtcggttatttagtttctgctaatggtgaaaatttaacatctctctcaagtttatctactaattttcctattaataaacagaatagagaaatcctttggaatgaggtcaataatttttggcaaccgtacacacagaatatacagaaaattttaagttcccaatttactgatcaacaatggagataaaacaatgcaaacagaacaaccttggtatattggtttccgttcagaagctttagctgttgtttacttgactcgtcgtgatgatttgattgtttctcaacaacaaaaagacacaggattagatttattagtaaccatcacccaagatggtaagtctagcggtagaatgtttggggtagaagtgaaagcaacagcttctagttctaatttgattcagcatgatagtatttttaagctaaaaaataaaagatataacaatttgaatgtcttgagagatttaccatttccagtttgcttatttttctttacattagataatgataaaggttactataaatggattttagaacctatcatcaaagatcataataatgtggctttgaaaattaatgaaaatgaggaatttaaaaacctgaatgatgagaaaatagatgatattattgcgatggttaataattggtatgaccataaaagtaatttagtagaagtatagtattcatgtttttggcatataatatcatgactcttacaaaggaaacacaatactactcactcacagaatatctagaatttgaaataaattcagaaatacgtcacgaatatatagatggcttaattataccaaggactggtggaacaataaatcataataaaattactggcaatttttacgctgtagttgaaaaacaaaaacgagaacaacttgtagaaaaattacgctccctttctcctgaacaacttaacgctttaggaattagtctggaaatgttagaataaacactaattttttactaattttttaaaatattcctaaaaaatgtcagaattaggatatcctgattctgaccatcattattaaaatgtccctttattaaaaggcccctttaaatgctgcataactcaaggtaataataattggtaaaataataggaataataatgattaatcccattttactaatcctaatttcttgaccatcagatttaaacagtgcaattacagcagcagtggccatgaaaatccaaataaatccaaagacgataaagatggtaaatgctgagttattcatacattatatatttcatttgtggtgtactaatattttaatttgtcagaatcaggatgtccgggatttgaggatttacaggatgttattgaatgattgttttttggaagttaggtgtttttcaggatgtttttgaatgattgtttttgaataatttaaaccatccaaaaattactatcctgttcatcctttaatcctggttatcctgattcagacaataaaaatggtgcgttacttcgtgtaaattgattggtgtattttatgatctttttgcattcctaacgcaccctacaaactactaattttcattagcttctatcaaaatagtataatagagttgatcaccaattctaaaagctgtgtgagaaattaacttatccatcaaagatttaacattattaattaatcctctttttttagcaatcaacaatatacctaatactccagtcaaagacaatcctaattttatcgcttcctgtctttctaatctttcatctattaacaacttattagcatttaattctattgctaatacaattgcttcagattctcccctatctaaatttcgctgtaaatcttttactaattgataattaataacaggtttattcttgagaaaattagcattttttatagcattattaactttttctcctgctctaatatctgttaattcatcatatactgcttgaggaataataacttcactataaatttcttgcagtaaaaataggtgatcaattttagctaaattgctaattggtgatgtgttactaacaataatcataaccaacctgtttcttgaagagttttcatatcttcttgaaattctgcaacatcataatgaagggaaatattacgttgagctagtaattcctgaaattctacataattcatttcagctattttactagctttacctaaactaactttttctttttcaaataacatcactgcaatttctattaataattcttttgatgtcattcctgtagaatggagaatttcatcagaaatagttaaactcataaatttatctcctcatgaaaattgtgttgaattaattatttatctttacttgatcaagtcttataatataatatcacaattttggtacattctcaaatcttaattaaaccttgcatttctcagaatcaggatgtccaggatttaaggatttgcaggatgtgattgaatgattgtttgtgaggatgttgggtattttattggtctgaatcaggatgtccaggatttgaggattttcaggatgtgattgaatgattgtttgtgaggatgttgggtattttcaggatgttttttgataattttatttaaatgattataaaccatctaaaaattaccatcctgtacatcctttaatcctggttatcctgattctgacttaataattttctgaaagctttaaatgttacagtttacaagtctcgacgcgagataaaagaacccaaaacccgaccatcctaataacttacgtgacccccaacctaaagtatacacacaaggtaaaaggtgagggaggtggccaattggtgcttttatatcaaaagtagtatctctgtaatacaaaaatcttcctccttttctccatcctaccttctccccgaacttctcccagatttcttggttatattctctcgttccatccaaaccttgataaatccgtttttgcacagaaaacccaaaattaccattactgtattttacccacaactggtcaatggtgcggaggtctgcacaggaaaaattatcaatacttttagtatctaaccaaccttctttttcccgtttcgcaaccgctaacattacccatgctgtttcttcatccgcttctttccagtttccagctttgaggtagtcacgcagttttctgtagtccattcctacatctgattttaattgtgcattatcgaatattattaatgcctcttttaccttttcttctgtgcgaggttctaacaaagtataagccgtattttgtacatatatagactcatcatttaaagcctgaataactaaatctaaaccactttctccataattcaaagcctgtttaactgagactattcttacttgggggttaggattactcaatcctaattttactccttcaatgccacctaaaactgctgcaaactctgaggtttgatgttgactacccagtacagcatcgtattttcccggttgttgtgaatgatttgtcattggtatagattaccctattgattcagataaaaaaagacatcaaatcaaaccatcaatttatcaataacatcctgtaaatcctcaaatcctggatatcctgattcagacaaaatttagatccccgacttctttgatctaatcatcctgtatcaaaatcaattatcctagaagtcggggatctttgtgatacaaaattttactatatatgcgcggacagatttccactgataacataaatataatgtaaatttcgcgtcttgtcaagtcttaaatttttgtctgaatcaggatgtccaggatgataggattaacaggatgttgctgaatgattgtttgtgaggatgttgggattttgaggatgttgtttgatgattgcctttaaatgttataaacaatctaaaaattaccatcctgtaaatcctttaatcctggatatcctgattcagacaaatacaactttcatcaccaacaaaccatttaaaaattaccataaaatataaatacaatcttggttatgcctatgacttctttcacagtattgacattaccagaccacacccagttaccagactcagatggtactttcgtgttagcgaagcgtaccgtaggtcaaaatcttcaggaacatccccaaagtatattaattacagactctattaaacctattctcgaaaaactgcatcctgatggtcaatattgtatcggtcaagattctgggatatattggcgtttaactgatccaccagaaaaaggtgcagaagcaccagattggttttatgtacccaatgtaccaccaactttaaacggtaaaatgcgccgttcttatgtgttatggaaagaatatattgcacctttaatagtaattgaatttgtctccggtgatggtacagaagaacgaaataaaacaccaccatctcaaggaaatgatggaaaagttggtaaattttgggtttatgaacaagctatccgtgttccttattatgccatttatgaagtagcaaaggcacaagtcgaagtttatcatttagtggataataattatcaattaatgacacccaatgaacggggacattatcccattaaacctttaggggtagagttaggaatttggcaaggtttatatcaaaatgctgatttaccttggttgcgttggtgggatgaatcagggaatttattgttaacaggtgaagaacgtgcagcagttgaaaaacaaaagcgggaaaaacttgtggaaaaattacgttccctttctcctgaacaacttaacactttaggaattgatctggaaatgctagaataaatactaatttttcaaaaaattcctaaaaaatgtcagaatcaggatgtccaggagttgaagatttacaggatgttgtttgaaagtctcatgttttgatttttgattgtccatctttatctgtgtttatctgtgtttatctgcgtttatctgcgtttaattattcttgatattactgaaggtgcttagtttgaaatagtctcgcgcaatctctcttaataaatcccgtagggtaagcgaaaatacgcaaagtgttttttagtgtctttgcataaagttaagttaaaaaatgataggttgagttaagcggaagcgcaacccaaggaaaagtttgataatattaattttgggtttaacttcactgtgttattccataattgatgaaggattgatattgatgacgataagcaaggagaatagtttatgcaagtaagacaagaaatttttgatacctattggcgatttgctgctatgcgtcaggaagtattttttaacaaacttaaaaatgttccaccaccttggacgagcgatcctattcttaatacttataaattttgtaatgcttatcgagtaagtgatcgggtttctcaatatctgatcaaaaatgtaatttatgatgaaaataggagcaaaaatgaagaagaagtgttattcaggattttgctatttaaaattttcaataaaatagaaacttgggaatatttagaaagcaaaataggaaattatattacactgtctaattttgatttagacgtatattcaaacatattacaagaagctatggatcttggatatgtgatttataccagtgcttatatgtcttgtgctagtaaagagtttggttatgataaaaaacaccaaaatcatttggcattaattgataaaatggtttgccaagatagggtgattaatcctatagtcaaagctaaaaatttagaagaaattttccatattcttgcatcttatccattgttaggtaagtttatggcttaccaattagcgacagatattaattatagtgaagttattaactttgatgaaaacagttttactatagcaggaccgggcgcagaacgaggtattaataaatgttttattgatactcaaggaaaaagttatgctgatgtaatttattggatgaccgaaaatcaagaaaatgaatttcaacgattgggattaaatttccaatcgctttggggtcgtcctctacaagccatagactgtcaaaatcttttttgtgaaactgacaaatactgtcgagccgcatttcctgatttaaaaagtaatcgtaaaaagatcaaagcaaaattcactgcaactcctcagccaattgattatttttatccacctaaatggtgtattaatgatcaagttcaggaaactttagcacagagattaccaccattagaaattcctaatttgcaagataattctcagcaattatctttagagttagattctttggtaaaaacggcatccgaaatatcagataatgtatcaaaattgcataaaaaatatacgcaagaaacgcagaataaaaaatcaaaagctttgaaaaatacagagttgcaaaaatctcaacagttgtgtcttttttgatatattctactatttataaatcaggagtaattcagggtaacacacatggaaataaaaggatatgccgagattgatattactaaaaagtatcgctatttattaggacgtaaatgggatgaaactttgccacaagttacctttataatgcttaacccaagtaaggctgatgaaaatgaaggtgatcccacactgactaggtgtattaactttacccggtcttggaagaaatacggttctcttgaactggttaatttattcgcttatcgtgctacaaaaccctatgaacttcgccaagtagatgaccctgtgggaccgaaaaataactactatattgaattagcaacacaacgcgctgacttaattattttagcttggggtagtggtgcaaataagcataccagaattaaaaatcgtgataaggaagtgctaagtctaatttctcgtaaacaacctatttattgtctagagctaacaaagaaaggatttccacatcatccgagaggtcttagaaataatctagagccaattatttttccctatcaacaaagctaaatttcaaattttcatggtgacactttttaagtattactcagatttgtattttatctctataaaaatcaacaactattttgaaataggagaaattgcatcatgaatttttctgaatatcaaacacaagcattgaatacagatcaaattcctgctgttgaaggtagtgaattaatcataccgctattagggttagttggtgaagttggttctttgatgacagaatataaaaaacatttacgcgatggtgatgcacacaaattatttaaagaaggaattgcagaagaattgggagatatgctttggtatatttccaatatagccagtaaatttaacctaaatttagaagaaatagcaaacaataatttgagaaagtgtaatgaccgttggggatggagaaattcatcaccaatagatgagccaaataccatatacatttttgataatgacttcccagaaactgaaagattgccacgacaatttgaagtagaaattacagaagtcagcaaagataattccgtgaaaatgaaagcatttatcaaccaggaacagataggaaatgatctcactgataattcttatcaaagtgatgggtatcgcttccatgatgtttttcattttgcttatgctgctattttaggttggtctgtagttactcgtagcattctaaaacgtaagcgcaaaagtaatcctcttattgacgaagttgaagacggaggtcgtgcagtagctattgaggaaggtatatcagcacttgtattcagctatgctaaagatcacggttttttagaaggtgtttcaactttagattatcaactattgaagactattaaaaatatgacatctcatttagaagtttctcgttgttcattgggagattgggagaaggcgattttcatgggttatgatgtttggagacaagtagagaaaaatcatgggggaaaggtagttgttgatcttgatgcacgttcgattacttatcaaatttgagtaagctagactcaagcaataaatctattttcttaccagtgaagcatcataattaattgtctgaatcaggatgtccaggatgttgtttgaaattatcgtgttttgattttcgattgtccatctttatctgcgtttatctgcgttcatctgcgttcaattatttttgctatttttaaacgaaccacagagacgcagaggacgcagagaaaaaatatcatttatctttttattcatgcaattaattatgtttagaagtcgggaatctttgaccacaaactaaaatcctgtacatcctttaatcctgtacttcgacttacttcgactgcgcccttcgacaccgccctggacaggctcaggacaggctcagtacgagtcgctcagtaaccagatatcctgattcagataatacctttgacagatgaacaggtataaactcagcatctaagatatcaaagccggattgataccaaaagtatgaattccaactttcatatttggacgctgacacctacagatgtctacaagacactaacaacaactcctcaaggtatcagcgaggcagaagcaaatttaagattaaaacaatttggttataatgaacttcctgaaccacaaacacgccctttaatactccgtttcactgaccaattaacccattttatggcgttgctgttgtgggtagcgggaatattagcttttatttcccaaacgccggaattaggttgggcaatttgggcagtaatttggattaatgctatttttagtttttggcaggaatatcaagcggaaaaagctttatcagcactgaaaaaaatcttaccttcccaagctaaagtttatcgtgatggaaaattatctgtaattgctgcccgtgaattagttagcggcgatgtcatgcagttagaagaaggtgataaaatctccgctgatgccagactgattgaaagtcaatctttatatgtagatgcttccgtacttacaggggaatctttgcctgttccccgcattagcgaacctgtcaccgccgcaaatatccatgcttcggaagcgagtaatttagtatttgcaggttctacggttgctgctggtcggggactggcggtagtatatgcaacagggacacatacagaatttggtcaagtcgcccatcttacggcaaatgtgaagcgggaagccagcactttagaggtgcagatttctagggtggttcacatcattactatcattgctttgagtatgggggtggtgatatttttattaactaagttgctggtgggaatgcaactgaaagaaagtttcatttttgccattggtattattgtggcgtttgttcccgaaggtttactacctactgtgagtttagcattggcaatcggtgtcagacgcatggctactaagaatgctttggtgcggcgtttgtctgcggtggaaactctgagtgcaacgactgttatttgcactgataaaactgggactttgactaaaaatgaaatgactgtccgccaattatggattcctaatactaatatcaatgtgactggggtgggttatgaacccaagggagaagtagaaattacctctagtgaaaatcagtctcaggtgcggttaatgttgactggtgcggcgctttgttctaatgcgcggttaaatcatccccccaattccaatcaatggcaagctgtgggtgatcctacggaagcggcgttattggtggcggcaattaaggcgggtttgcagttggaggagttgcaacagcgatcgcccagggttcgggaaattccttttgactctcaccgtcggatgatgacggttttgctagaaggacatttgcagttagataatgttgaaaattgcgagtatgtgatttttactaagggtgcaaccttagatgtgttgcaacattcgcggtatttatggcattcgggggaaaagctggaattaacggaaactcagcgcgagggagttgtggcggctaatgatcaattggctagtcaaggttatcgtgttttaggggtggcgacaaggcaaggtgggggggaattaaatcagctagataataatttgttagaacaggatttgacttttttggggttggtggcgatgattgatccaccacgtccagaagttgcggatgcgatcgctctttgtcatcgtgccggcattcaagttactatgattacaggtgattatggtttgacagcagcagcgatcgcccaacgtattggtttagctaacggtaaacccagaattatcaccggtgaacaattaggacatctttctgatacgcaattacggcaaatcatccacaagcacaaaaccgggttagtatttgccagagtcataccagaacagaaactcaggttagttgaagcctataaaacccttggtcatatcgtcgctgttactggtgatggtgtcaacgatgcccccgctttacgtgctgcaaatatcggcatagcgatgggaattagtggtactgatgttgcccgtgaagctgcggatattgttctcatagatgacaactttgccactatcgtctctgcaattgaacagggtcgggcggtgtatcaaaacatccgcaagttcatgacttacattctcgcttccaacatggcggagtttttacctttcctagcaatggtgtttctgaaaataccgccagcactggtaattttgcagatattagccattgacttaggtacagatatgttacctgcactggcattaggggcagaaaaaccggaaactggttcaatggagttaccaccccggaaaaaatcccaagcactgttagatttacctttattactgcgtgcttactgctttttaggtctgctggaaggtttagcagggatggcaggatttttctttgtttggtggacaaatggttataaccttccccaattacaagcacttagtcctagtattttatcacactcagctaatgccgcgacaatggcgatttatcaccaagctacaactatgactttagccgttattgtcgcttgtcaagatggtaacgtttttgcctgtcgttccgaaagattttctattttgcgtttgggcttttttactaaccgtttaatttgggcaggaattgcggtggaatggatattgattctatcaattatttattctcctattttgcaaaatgttttctcgactgcacctttaaaaccatcttatttgttgatgttattgttttgtccaccgttaattttaatagctgatgaattgcgaaaaataattattcacagagtcaaccatcaagctgaaatctcatagttatcaattgataattgataattgacaatggaaagttacatcttgctcaagggtagaggatagaaagcaaggaaaggtttttagtaagtattcagcctcctgccttctgccttcgttaattttcttgatcttgaaaactagagatttacaacccaattaacctcattatcagggagtatcccaaatgtgtaaatttattttttaaatttatttttatctcacgaaataaaatgctccaaggctgaatatgattgaaccgcaaagggcgcaaaggacacaaaggtaagaaagttgagccagagtttttggtgtggttgcgttgatttttgcaaaattgggatgctccccattatcaattgtcaattatcaattgtccattgttaaatccttgacaatattttgctaccatactacctaaaacttgtaaatctatgggtttggaaatataatcatcaacaccagcagctaaacaagtttctttatctcctttcatagccattgctgtttgggcaatgatcggaatatgctgatattgaggatgttttcgcagttgttccactaaactcaaaccgttgctatctggtaaattcacatccattaaaattactgctggttgtatctgtgggagagtcatccacatttcctgtgcattcttaacacaagttacttgataacttaatctacttaaataaattcgcattaattcagaattggcaaaatcatcttctagtaacaaaatttctcttgatgcactgatgggaatatgagaagaaaactgagaagcagaagaattactcgttaattgacttaattctaaatctttttttgccttgtcttctattgcttccaaaacttttcctgtgggttgaagtggtaagataatagtaaaagcagaacctttatttacttccgattctaactctaaagaaccaccatgaatttgagcaagttgttgtgtcactaccaaccctaaaccagtaccttcgttgtttctaaaaccggggttcataatttggctataaggacgaaatagtaaagattgatattctttggaaataccaattccagtatcccaaactgtaaatcgtaaagatgaatcttgtgtagctactcttaaaccaacactacctgaattggtaaatttgactgcattaaataataaattcaagagcatttgcttcagtcgcaaagaatcagctaataaagttgttacatcatcgttaatttctaaacgtaatttcaaacctttattagcagctttttctttcactaaagctaaaacattgctacataatgatggtacatcaattacttcccattgcacttctagctggttggcttctattttggaaagatccaaaatatcgttaattaagtctagtaaatgtttaccactcgattgaataatgtgtaaatattcttgatggcgttgtctgtctggttcgtaaccttgtgctaaaagtagatgagtaaatccaattatagaacttaaaggtgtgcggatttcgtgactggtattggcgagaaattgatttttaagttgatttgtgcgttctaattcttgattataattggctaattgttgacatctttcttgccaaaattgcatttgctttagttgtgttaaagctgtatgacaatgctgaattgttcttttaatgaattgcgatcgcaggggagttaagaatggtttaattgaaacaccattcacgttagactttgatgtggcaataattagccatgccatcataccgttatcatcatcaactaaacgccaagcactgccaggtttttgtttctccatttgctgcaaatcttccagtctgatggtagcgtttaacctcaagtccagctttgttccaggttgggatattatttctatgattggtgttctcagggagggagaactagaaacataacaaatcttacccactatttcatctgctggaaattgagcgatcgccacccaacgcgcatttaaagctttttccagttcgttgactaccgtttgataaatttctgcttctgtctctgtggactgcatcatattagcaaccagcagacaatcatttaaacgactctgcaaatgatttaatctgttttgcaaccaaaaattatcccgccgttgctggattgtgtgcaaaagttttgatgttccatcgatctgggagttttgttctggtaagtttgaagactgctgcatggttcactagacagccaaagaaactaaccttggcaggaaattatgaactggattttatgtatattaacggagaagtatcttttaattgtaaattataactgatagtgtctattgtaacgcctaatgcaactgttattgaatcacattacacatttattttattttcttcacagaaacttaaaacaatggatacacaactagctcaattaatcattaacggcattgcggtgggcagtattattgctctaggagcagtaggactaacgctgacctatggaattttacgattatcaaactttgctcatggtgattttcttaccttgggagcttatttgactttggtagccaatgccttgggtgtaaacatttggctatcaatgattttagcagcatcgggaacagtcgcagtaatgttactgacagaaaaattgctgtggtcaaaaatgcggtcagttcgtgctacttccaccacactgatcatcatttctatcggactggccttatttctccgcaacggcattatttttatttggggtggtaaaaaccaaaactataatctccctgtcatccctgctttagaatttggggaattacggataccgcaaaatcaattattggtactagggttagctgtgctggcgattttgtttcttcactacatattacaaaacactaaaatcggtaaagccatgcgagcagtggcagatgatttagacttagctagagtatctggtattaacgttgatagagtaattctttggacttggataattgcaggtacttttacttctttaggcggtagtatgtacggtttgattaccgctgtacgtccgaatatgggctggtttctgattttgcccttgtttgcctctgtgattttgggtggtattggcaacccctacggtgcgatcgctgctgcttttatcattggtattgttcaggaagtcagcatcccttggctaggttctcagtataaacaaggtgtagctctcttaatcatgattttggtgctgctcatccgtcccaaaggtttatttaaaggcacaatctaataccattttagattgtggattttggattctggattgtgaaagtcttgatatatcaacatttgatcttttaattgttcaaattcatctttccaattagtataaaaaatcagccttcagccgtcagtatttagcatcaacctaatggcaagaaagttgatcgctaaatactaaatgctgaaagctgatagctaattattcaatgatctgaaaataataagctgccaccaagaagttgatcgccaacagtagcaacgcccaactggcacggaaaacgtaagaaggtttagcagcttttcctttggaagtcataaatttggttctcctgatttaatcacttttccacaaatagcaaacataagcgccaattttccagaaactttaaaaatatttgtgtggggactggggactggtgactggggactggtgactggggactgggtaatcaattttatgttttaccaatcaccaattaccaatcaccaattaccaattaccagtcaccagcatgataagaactccgcaccagaggaccagaacgaacatgactaaagcccatgtcctgggctattttccccagttcatcaaattctgctggtgtccaatatttttgtactgggagatgttccaaagaagggcgcatgtattgaccgagtgtgatgcgatcgcaacccacagcccgcagatccgccattgtttcaattatttcttcctgagtttccccatgtcccaacattaaaccggacttagtgggtatactggcatcaatttctttcactgttgctaacactgccaaagagcgatcgtattttgcacctcgtcgcaccggacctgttaacctgcgaaccgtctccacattatggttataacaagccggttgagcattcacaatcatagctatcctgtgcttttgaccagtttcacccacacccgcaccaccccaaaaatctggtgtgagaacctcaatttgcgttgctgggttcatttggcgaattgttgccatagtcttgacaaaatgacccgcacccccatcagctaaatcatcacgggcaacagcagtcagtaccacatagctcaatcctaacaaatgtacggattctgctaccttttgcggttcttcctcgtctacgggcattggtgcgtgacctttatctacttgacaaaaagcacaagacctagtgcaagtcggacccatgagtaaaaaagttgctgttttttgggcgtagcattccccccggttgggacagcggccttcttcacaaatagtatgaatttgacgctgcttaataatacgttgtaccgtggaaatttcactagctttaccaatagaacggcgtaaccagctaggcatggcagcaatttctgatttgagttcttgtgcagaattcatataatctgttgatgaacttgagaatataaaaaatcactgggaaatactgtaatatgatacctataaaagtaaagctaccaatagcttacaaaccattgtttacaaggcaagcagcaatttgaaaatttacttccgatttccttacagctttggcaattatatggaaatatactctcccccaatttacgcaaatcttatatatagtgggagaattcttaatgtcagtcggcgcatcagccatataaacttatagtctctggtagagtaatcagtcgtggccaacaaaattctagttatcgatgacactacagttgtcagagtaaaagtccgtgaaatgttgcctccaggcaattttgaggtattagaagcaaaagacggtttagaaggatataatctcatccttaacacaaaagtcagcttgatcatgttggattttattttaccgaaaatgagtggctgggaagttttccaaaaaattcaagccaacccagaattaaagaaaattcctttagtgatcatgtctggccgtaaggaagaggtgacagacaaaattaccgaaccatttgaatattttgaatttctcaacaaaccttttgacaatagacagctgattactgcgattaaatcagctatggcaaaagcagctaaaaaagcccgtacagatgctgttactccaacagctactgcaacagcagcattaggagctactaaagctggtacagaaggagcttctgccgcagaaattcaagctctgaatgctaaaattgccaagatgcaagcagaaattgataatttaaagaaacagctaactcaggtggtgacatttattaagcagaaaattaaatagggtttgctgaaaaagtctcttcgttaaggcagggaatagggaatagggaataggcaagagtttgggtgatctgttagtaaccaattctttgaaatttcacccggaaaatgcacgcttttaggagtatacccctgaaaaatcctgcactgatttcctgattttctacctgaaacccttgatttatcaaggttttgagtttattcagcaagccctaaataagtcttcttggctctcacgaatgttaagaaagatcccggtaatggatagcgaacctcacaagggtaggtttttaatattatctgtgaagggaagacctggaagacacggagggaaagtagacaaggaagatttgatacgcacaatggtattttgacggactgttctggtgaccaagagaatctgattttgtacggttttcctcccttgtccactgtccttccaagtcgtccttgtcttgccctcacgacaatgtaaaataccgacccttgtgagatatacctatctccccatctatcttcccagtccacagtccccaatttatgaagctagtgctacttctactttttcctgtaattcacctttttgatacatttcatacaaaatatcagaaccgcctaaaaattcaccattaatgtaaatttggggaattgttggccactcagaatattctttaatgccttgacggacttcataatcagaaagcacatcaaaagtctcaaagggaacgcccaaagcattgaaaatctgcaccgcattgttagaaaaaccacattggggcattaatttagttcccttcatgaaaaccataattttattgttcttgatcaagttatcaattttttctttaacttctggtgtcattgttgttagttcctttttgcggagattcaaaattccaaggttcattcaattttagattgatttattagattgatttattagattgatttatagattttgatgagattgcaattttttcactgtcatgtaatttattcaatccaaaatccaaaatccaaaatccaaaatccaaaatctaaaatccaaaatctaaaatctaaaatctaaaattagtcaagcttcgggagtagatgttttcaaagccaaggcatgaatcgcttcagttgacatcgcttgcttcaacgcaccataaaccatttggtgttgttttacaagtcccttacctgcaaactgtgatgaaacgacagtcacctgatagtgatccccaccacctgttaagtcttgcacctcaacttgtgcatctggcagttctgccttaatcatgtcctcaacttgctgtggagtaatcatcccaattcctgaaaaaaacttacttctctattattatcagggaataggtgacaggtgacaggtgacaggtgacagttaagaggcaggggagcaggggaagttaataacacaatcaacaatcaacaatcaacaatcaactatcaactatcaactatcaactatcaactattttctgggataagcggtatcaacaaaacctaattcaaacagttgttgataagcttttttacctaattcccgtgtggggttttgactcttaataatttgaatcaataatggtactgctaattctggctgatttaaagctcgatgtactagtgctagttgataggttgcttcgtcgcgtttttgggcagtttccagggcttttttgcgttgagaatcagatactctgatgtcaataccggaaaaactggcatttaaatcttggtaaaaattagatagctgattataaagttggcgtgcttcttggagttttttagcagctagggtgtagttttgaccggaaacagcttgttctgcctctttcattaggcgatcgccacctgccatacttaacaagctattattttggctgttgggacgcagggtattaggttcattaccatcaataggttgtgcttggttatcgggtagctgtatgacctgagcctgtacaggtgataacagactaagaattgcaataagtgataaagaagtagcagtaaggttcatggggtcaaatactgtaacaagtctataaaaaaattatggaaactttgggtatcttaactcggtttgtgcttgagatacagcaaaatttagatcacaactttctctgatgtagactggacatcagttgaatagagttcctgtaaccctgcatattcagtcaagtattccatgatgagcgatcgccttaattcctctaattctcaaactacaggtgtacctataagcagccaaggagttgttttacaacgtggtggagaagaattgattttagaaaaagtttgggaacgctttaccatccgtccgacagccaaactttctcctgaacaattatctcaggtttcttggggcatttggcggcgcactatccccagagccaaattagaagtattcaccgttgaacctagccggttagacgcggccatgtcccaagcaagggctgatgaaaaggtagcttttgctagtcatgtttacaagtttaaagataatccaggtacttatgtttatttaagtgaccaaatcacaattcaatttgcgacttgggtggactctgccaaaattaatactatagctgccacatatagcttaatggaaaatcaatcagttccagggctacctaatacatttatttttcttgttagcaaacaaaccacagaaaatcccattaaaattaccaaccaattgcaagcacttccagaagttttagctgctgaactaaatatttttattcaacaagaaccacattataaacctagtgattctctctattctcagcaatggtatcttaaccataatagcggtaatcagttaggaataggttctcatatttctgtagaacaagcttgggatattactcgcggtgtgcgttctgtggttgttgccgttgtagatgattcttttgatttaaatcatccagattttcaaggtttgggtaaagttgttgcgcctagagatttgaaagaaaatgattttttacctttacctggagaacaagaaaccagtcacggtactgcttgtgcaggaatagctgtagccgaagaaaatggtcaaggaattgttggtgttgctcctggttgtgctttaatgccaattcgcaccacgggatatttagatgatgaatctattgaagatatatttaattgggcaattaatcacggtgctagtgtaatttcttgtagttggggagcttctgctgtttattttcctttatctttgcgtcaaaaggcggctattacccgcgctgctactcaaggaagaaatggtaaaggatgtgtaattgtttttgccgctggtaatgctaatcgtcccattgatggcactatcaatgagcaaaattggccaaagaatattttacaaggtaaaacagcttggttaagtggttttgcagttcatccagatgtaattgcggtttctgcgtctacgagtttaaataaaaaagcagcttatagtaattggggtgaaaatatttctgtttgcgctcctagtaataatgctcctccaggaatgtggtttcaagaaactggttttgtttacacacaaccaaccataaatacttctcttcttggtttgggaatgtttactacagatcaactcggaacagctggttataatcctggaaattttactaataattttggtggtacttctagtgcaactcctgtagttgctggaatagcagctttaattttatcagttaatcctgatttaacggctcaacaagttaaccgtattttacaagaaactactgataaaattgttgatccagaacctgacccacaattaggtttgcggggtggaacttatgatagtaatggtcattgtatttggtttggttatggtaaagtgaatgctgctaaagctgtacgtgcagcgcaacagttgagtaaagtggcatcaagtgttaacaaacaactaaaaggtgagaataaaaatatagtggcaattcctgataatgatcaaaggggaatcaggagtataattacggtgaatgaaaatgtcactgttgcagatattcaagtaacggtgaatattactcatgaatttttaggagatttagaaatttatttaatttctcctaataatcaacaagtgttgttacaaagtcggacattgggaaaacacactcagttagaaaggacttatagtgtgcgatcgcatcctgtccttaaacaattactttccatctctgctaggggaaattggcaattacaagttattgataattcacctccagatgtgggtcaattgaatatttgggaattaatcataggatatgcgtaataatgcacccaaaaatcaatttctcatccatataaacccaataaaaaatattcggttttaaccgactttagcccggatttctcactagaggaaaaaataattgatgaaaagccagagcaaaactttgtaggggcgaagcattcgggtgataagctgttacacagctaaattgtataatcctaatattctgaactcttgtggaacaggcaagatgcctgttccacttatacaaattaaatgcacaacagcttacctatggctgaaactagttcatattctgtccgaatgctatccgcccttacgattaatgaatcggtgttctagataagaacaagcaaaatttactcaaactttatatacctgtatatacctgtgcgccttttcatcgcctttccgtagtgtcgcaaatgggcgctaaacaaaaatgctaacatcctcaagatagatatcttatttctggaagtatgcaaaaataaaagtagcaacaagtgtaaaaaaaattgaaatcgttttttattcttgactactgactgctgtaagggtttagcagtgctaaacccctactcctgtaactcctgtactcctgtaactcctatccccaggaggtaatacttatgatagatacagatataaaaattgtttctttaattcctagtgcgacggaaattgctgctactctgggtttgcaaaatgctatagttgggcgatcgcatgaatgtgattatcccccagaaatttcccatcttccagtttgcacacaagcacggttaaatggtaaagctcctagcaatagcattcatgatcaagtaaacaaaatagtacaatctgctttgagtatttacaacatcaaattagatgttttagagaaattgcaacctacccatattcttactcaagctcaatgtgatgtctgtgcagtcagtttaccagaagtagagaaagctgtcacccaacttacccacagttcaccacagattatctctttacagcctaacacactgcgggatgtgtggggtgacattgagagaataggtcaaacctttggagtagattcagtaaaaatacttgaaaatttagaagccagagttaaaatttgtaaccgaaaagttcaaggactgtctgtagcagaaatgcctacagttgcttgtatcgagtggactgatccggtgatgacggctgcaaattggatacctgagttagttaatttggcaggtggacaaaccttgtttagtgttacgggtaaaccttctgctctcatcaactgggaaaccttggttgctactaaccccgatgtaattatttttatgccctgcggctttaatttacaacggactcaacaagaagcgaaattattaactcagcgtccagagtgggaaaaactgcacgctgttaaaactggcagagttttcatcactgatggtaatgcttattttaaccgacctggaccgcgtttagttgattctgtggaaatattggcagaaatattgcacccagaaatatttgattatggttatcaaggtactgggtggcaaactttacacaactaagaagagtatttaagagagcaattaatcatgaggcgaagtaggggcgaagcattcggaaaataggctgttcataaaattgataattgttcccccgaatgcttcgcccttacaggaaaataggctgttcataaaattgataattgttcccctgaatgcttcgcccttacaggaaaataggctgttcataaaattgataattgttcccctgaatgcttcgcccttagaggaaaataggctgttcataaaattgataattgttcccccgaatgcttcgcccttacaggaaaataggctgttcataaaattgataagctgttacacagctaaattgtataatcctaatattctgaatattctgaactcttatttaacaggcaagatgcctgttccacttatacaaattaaatacacaacagcttaattgctcccccgaatgcttcgcccctaagactcctgactcctgctataatattctaatttcgatttggtgcaagcgtggtccgctaactgagactatagtaaattctagattctcatagttgaatacttcccctttggcgggtattttttgcaactgataaagtacaaaacctcccaaagtttgatattctcttgctaagggtaaattaatatgtaaaacttcatttaggtcttctagatttatctgtgcttgcactaaaaatgtttgcttttctaacatttgcactaacaaatcatcagtaactgttggttcacctgcattaccaataatttcagcaattacatcttgaattgtcactattcccacggtagcgccaaattcatcaaccactatcaccatcgccggtttttcttgctgcatcatgggcaataattcgctcagaagtgtctgttctgggacaaaccgggggggacgcatccaagggtaaatttgtgtttctaaggtcattttcccctgggataacggtgttgctaaatcttgaaaataaacaataccgcgaatgtcgtctaaagattcaccaatgatgggatagagagaatgtccagtagatgtcatttcttgtaataatgtttgaaaagtagcatcttctggtaaagtaataatgcttgtccggggaatcattacatcttgagcggtaatttctccaaactcaaaaatattatttaacagttctctttctgctaattctaaacctgttgattcccgttctgttgatataattaattgtaattcttcaggtgtaactggaggtctccaactttgacctgtgtattcaatgccaaataattttaacaggtaacgggttgattggttgagaatccaaattaccggactgaaaaatcggactatagctttcacagaaggacctaaaaacctggccagtttttcggaatacaacatggccactgatttaggaaataattctcctaaaactatttgtaaataggcaagtaagaaaaaggtaatgggaattgatagagaatgagccagaaaattactcaaattccccggtaaaggccaggactgtaaccatgcgtttactatgacgacaatgctattttctccaatccaacctaatgccaaactagaaagggtaatacctaattgggcagtagataacaacctgtcaatactacgttgtaacatttctacagcgatcgcaggtatatcaccagcttgaaccagctgatggatacgagttcgccgcactgtcaccattgaaaattctgcggtgacgaaaaaggcattaattgctatcagcagtagcactgacaacagtttaaaccctatatctgtccaaattaactgagaaaaagcactcacctctcaaggttatgttaaagaattttggattttagattttagattttagattttagattttagattttagattttagattttagattgaccccatattgggcaaagtttaaacatacctacagtcaggggtttgttattcaattggaaattttgaatattgggttcaaaatccaaaggcgaaaatctaaaagtccgtcaacattattgtcatactaaaacgctaataatagcatttttatttttccacaggaatatcggatacctgtaatttcagtttttgggcgggataatctgttaacgccagtgatacactgctcacatcatctagtaaagctgtaggaatgctgattgtacctgtaaaggttggacctttacctggtaattcggcgggcaatccctctgtaatggcgctcaaagttctgcctttatcatcagtaacatctaaaaaactatacaagaatctaacagtatcattagcttgattctgcattttgactcttagtattaaatcaccaccagagtaacgaaccgattgtacagacattgttacgccttcgctctcagccacaactggaaatcctggttctagtttttcttctgctacttcttcgcgcttttgggcagcctcagattttttggctgtgatttcttcttcttcctctcgtttttgtgccttcttatcagttttattatctttgattcgcgcttttacagctttgataatatcttcctcttttaataaatttactctgtccgattgggcgttattattcctattgctggcaaatttgctagtggggcgaccatctggtgacgaaacacctttgagagcagaacttcccatcgaaaaacccaaaaatgcgctcacagaacctgctcccagcattagggttaacaaaatcaacgtcagaactacagtggaatttattttcatcgctgacaagctattacagaaaaaacatagtctatatattagtcaagaaaagcagagactggggactggggactggggactggtgactggggactggtgactggtgactggggactggtgactggggactggtgagtggggactggggactgggg

SEQ ID NO: 67 - DNA, 30069 bp, Sphaerospermopsis sp. LEGE 00249
  LEGE00249_83
ggactggggactggggactggggactggggatagttaattttgacactctccgggctgaagccacggagattcttggttcaacgagtccacttagattagatcccttgcggtgtctaacaagcgaggtggttctctccccaagcagtgcctacggttttggatggacaatcaaaatgttaaaccctacgacctgaataagtatactgctgtattagcgtcggaatttgattttgctgagaaattaaattcaatggctacttcaaaaatctaggcttgttggtgcaatattcaacattgtttagtaaataatcaatcaggacaatactttccatctccccacaccctacttaactggttgcagttttgtcaccttgagtttaaagttaccaaccccagtttctccaaaagaccggacacgaacaatataatttcctgtttcggcgatgcgggtaaacaggagagaattacttgtaccatcaggtccatcatcattttctgccaccgttgaaccatcaggacctaaaagagtaataatagtgtcaaagttttcagatgacaaatcaattgctaaattatcacctttatttaatttgactgtataatcacgcgcaaaccccccttgacctgtgggaatatctgtagctgtcaatgtatcagcaatttctgaactactatttaagggaatgggtttatataaattatttatatttatatttgtatttgtatttccattattcgtattttgagcaaatactgtatttatactgattaaaattgtcagtatacttacaggaaagatgattattttttttaaacccactgcaaaagctctgttcataaatgaaaacatttttccctcaaacacagggtataattttgttaattatagatttatcacccacaagttgcccattaactctaggctgatctatctttacccgttgtagctacagcagctacccccaatacagaaatatcaccttgattaagtgtatatacagcagatttgacggttgcgccagtagtataaatatcatccactaacagcacgggtgcatctggacgaatacggctaaaatccgatcctagagcaaaagcatctgctaaattttgttctctctctgcaccggatacgctaaattgtgcttttgtatctttaactctggctaacccatttgattttaattttaacccagtgatctgacaaaatccttgggcgattatttcagcttgattaaaacccctttctttgagcttttttgggtgaagtggtatgggtacaattacaggtttttgattttttaatgtacaatttaatatccatgattctcctagatactgacccaataaccgccccatttctggctggttttcatatttcatgacggcgatcgccctttttaatgttcctccataactcccccaactaaacacgggtaaaggttgtttccataagacattggggttttgcagatggcagctttgtaattgtttattacaatattgacaaagttgctgttttgtgcttcgctggcagatagggcaattgttctgtaggaataaatttagtaaatttttaaacatagtaattgctaattgctgattggtcattagttatttttcccagtcaccagtcacctcaagtatttcacatacacgcgatcgcatctttttgtttccactcctgtcgcggggatatatccattattctcataaagctggactgcttcttttaaaacgctggctgtttctatccaaatttgttcaaatccgcggttttctatagttaattctagctgctgtaataaatattttcctaaacctaaaccacgaatttctggtaaaagatacatttttctgatttccacagcctgttctccccgttttatgggataatatgcccctgtacctactattttgttttggtgttcaattacccaaaattcaccaccaacagctaagtaatattcctcaatttctaaaacgtctctatctgcaccgtctgcttcccaacctaagccatattctgctaagactgtactaattacgtttgctgctgctgtgcaatcgctcttttgccagtcacgaatgataaagttttggtacaatagtttcatgttgattagggaattaagaggaacgaaccgcaaagtacgcaaagtacacaaaggaaggatgttttcgagagattttttgtgtcagaggttgaatttaaaatctaagttaaatattaaggtaagttgttagtattaattatcagaatcaatctaaaatccaaaatctaaagttactaaacagttgcaaatattgaaaaataattgatacacttgttcctttataccagtttacagtgaagcagcgcccataatggtgcatatcaagcgggtcgaacttactaattttaagtctttcggtggtacaacttctgtccctttactaccgggttgtactgtcatttctggtcctaacggatcgggaaagtcaaatattctggatgcattgctgttctgcttaggactatccagttctaagggaatgcgtgctgataagttgccagatttggttaataataatcaagtcgctaaaggacgtaatgccattgaggctattgtaactgttacttttgatatttctgatattgtctcacgcaaagacgcaaaggcgcaaagtgaagaaggtgaagaaggtgaagaaggtgaagaaggtgaagaaggggaggaagttaaggaagtagaagaagcggaaaataactcccagtccccagtcaccagtcaccagtcaccaactgagtggagtgttactcgacgtttacgggttaactctcagggtggttatacttctaattattatattaatgggtcttcttgtactttgactgaattacatgaggagttggaaaatttaaggatttaccctgaaggttataatgtggttttgcagggtgatgtcaccagcattatttctatgaatgctagggaacgtcgagaaattattgatgagttagctggtgttgctgcgtttgatagaaagattaatcaagctaagggaactttagatgaggttaaggaaaaggaagatagttgtaaaattatagaaggggagttgactttacaacgcgatcgcctttatcaagataagctaaaagcagaaaaatatcgtcagttaaaacaggagtttcaagaaaagcaatcttgggaatctgtgttatcatggcgttctctccaagcacaacaggaaaagttagcaacggatattcaagctggtgatgttgcgtttactcaaatttctgaaagtttaaatactgtcaatcaaaatattgatcaacaaagtacacttctcaatgaattaaatgctcatgtaaaatctttgggtgaggatcagcttttagcggttcagtctacttttgcaaccaaagaagcggaacgcaagcaacttcaacgacaaaagggtgagttagagtctcatttacaggaaactgttaaacggttaaaccaaactcaacaggaaattcaagagtatcaggtttctcgccaagaaaatctacaacaatataattcaacaagtttaaatttaacgtctctacaaaatgaacgcaaccaagcacgagaaaggttagaatcatctcgtcaagttgcttcggaaattgctaccgcttcggaagtttgggtacaacaacaaacagctttaagtcggcaaattgaaactttactgcaaactattgaacctcaaagaactgagcaagcacaactgagagaaaggaattttcagttacaggaacttattacagaagaatctcagattcttgctgatttagaaccacaattgacagaaaaacaagcagaatgcgaaaaattagaagttgagtttaacggttctagtaaaccgattcaaaatttagcagagaatttagcagcgacagatcaagaattacaaatacaacaagatacccaaaaacgtttattacaagaacaacgcgataaacaacgtcatttagataaactggaagcacaaaaccaagcacagcaagaagtccagggaactcaagcaagtaaattaattattcaatctggtttaccaggtttgtgtggattagttgtagatttgggtaaggttgaatctcgctatcatctggctttggaaactgctgcgggtgcaagattaggtcatatagtagtagaggatgatcgtgttgctgctgcgggaattgaattattaaaacaaaaacgtgcgggaagagcaacttttttacctttgaataaaataaaagcttctaagtttaccccagatttaacactgcgttatgttgatgggtttgttgaatatgcgatgaatctggtagagtgcgataaacgctatcaagaagtttttaagtatgtttttggaaatacagtagttttcagaactttggaacaagcgagaactcaaatcggactttatcgcattgttactttagatggggaattattagaaactagcggtgctatgactggtggtagtaatacgcaacgctcaagtttaaaatttggcacttgtgaacaaaaagaatctgaggaagttgtcaatttaaggacgcgactaggagatattgaaagagttttagaacgttgtgcagaagccatcactaatttatctgctcgtagtaaacagctttctttagaattaacggaagcaagacaagggcgcagagaacaacaattatatttagaacagttgaaaaaagaggtaaaaaccttaaacgcgcaattagaaaatacccgctctcaactatcccaaaatactgaaaaattcaatcatgctcaaactcggttagaagttctagatctggaattaccagatcaagaaaatcaactgcaacaattacgacataccttagctgagttggaagcatcccaaacccccagcgaatggcaagaaattcaagctaccattagagaacaagagcagcaattacaacaaaaagaaactactgtcagggaagtagaacaaagattacaaaacctggaaaatcagaaacagcgtttacaagagaaaattactgaatcagaaacgcgagttattgaatatcaaaatgaaaaaactaatcttgaaattcaacagtcaacagttaacagtcaacttgcagaactgaatactcaaattaccgcaactcaagctagtttaaaagaacttgagcaaaatttaggtgaggagaaaaagaaacgagatacagcagaacaggaattaagagatttaatattacgtcaacaaaaattacaatgggaaattgacaagctgcaacaaacccaagaaaaacgcagagaagatttaaccacactgcaagcgcaattgcaaaccttagccgcagaattacccaaccccttaccagaagtaccagataaagtagatttagaagaattgcagaaagagttacgtagtttaggcaaacgtttacaggcaatggaaccggtaaatatgttagctttgactgattatgaaatagtagaaggacgtttacaagaactaacccagaaattagaaactttagaagcagaaagaacagaattattattaagaattgagaattttaccactttacgacaaactgcttttaaagaagctttcgatgcagtaaacgagaactttcaatcaatttttgccaccttatccgatggtgacggttatttacaacttgataacccggaagatccctttattagtggtttaaacttagttgcacaccccaaaggaaaacccgtacaacgtttagcatccatgtctgggggagaaaaatctttaacagcactcagttttattttctcactgcaacgttatcgcccatccccattttacgcctttgatgaggtggatatgtttttggatggggcaaatgtggaaagattagcgaaaatgattcaacaacaagcacaacaagcacagtttatcgttgtgagtctgcgtcgtccgatgatagaatcagcacagaggacaataggggtgactcaagctagaggtgcttatactcaggttttggggattaaattgaaatcatctgataattgaattagttaatagtattcaaatttcggactaactaagtggctaagaaagaagcaaaaacggatttatgggttcatagccttttacaagaggctaggatatatttagaaccttgcgtaattacggaaatttgaaggatattgataagccccttattgtatctggaattttgcttgcattacgagaagcggaatctggcagctttgaaattgataagctaaagggtgatgagatagacacggatggagaaaaaatattcaatgccattgagaaaaacctcaagcgttctaatgtatctccagaagttaagcgagataagattcttagtcagttctcgattattaaagacactcatattctgaatgaagtaaacccatccctcaataaaactcctctcaagcattttactgagtttttgcacgaaaaaatctacaagagcataaaatacatcagttcctcagaagattatttagggcgtttttatggggagtttatgtcctactctggcggagatgggcaaacacttggcatcgtactgacaccaaaacatattactgatctattttgtgacttagttgatgtaaagcctgatgatgtggttttagacccttgtgcagggacagcggggttcttgattgcttccatgcactatatgcttgctcaaacggataatgataacaagaaaaagaggattcgacaaaatcaattgcacggctttgaattacagccatatatgttcacgatagctacaaccaacatgattcttcgtggagacggtaagagcaacttaatcactgaactttgaattttttgagctatagtattgtcatacagagttatgacaagcaaaaatatgagagttaatgcaaggctcgatggcgatcgcgctagtaagtttaattacattcgccagaggacaaatcaaggtgcgtctgacattatcaaagtggcgatcgatctttattatgaaaaattacatcaagaatcccctgtaaagcctttgcaactccttagagaatcagggctgattggttgtgctgaaggggactctgatttgtcggttaattacaagcaatatctcactgaaagtcttaacgaaaaatatggtaatcgttgattctggcttttggatagcactaatcaatcgccgtgatgattatcatgttctcgctcaagaagttttagatacgattgatgagcctctggttacaacatggtgtgtaattacggaagcttgtcatattctcttgaaacgtacaggcacaaatgctcaacagacgtttattcatagcttagaaattggtgcttttgaggtttttgatctcaaggttcaagatgggaaaagaatcagtgaattgatgaatcaatatagttctctgccaatggatttagcggacgcttcattgattattcttgccgaacatttggggcatgggcggattctatctgttgattttcgggactttaatacttaccgctggaaaaatcgtcatccttttgagaatttgatgtctattaactaaaaatcatgactcacagtaatagcgatcgcaaaggttaagaaatcggagtagatggatttagcgaaaatgctagagtgatgatattgatggggctaagttgagctatgaccattgcaaccggaataccaatacaacagcagttactaagttttggtgattttatcgtccgttatggtgacagtaaccgctacgaattgattgatggagaggtatttgatttggaaccaacaggctaccatgaagaagtttcagcttttaccaccacaaaaatctgcgcccaaattgatgtaataggtttaaattggtttgtccttcagcgaggattactacgtccttctaacttgggtatgacagcatttcgacctgatgttatggttattgaccgcaatgaacttgcgaaagaactactttggaatgaccaatcaatcatcaccctgggcagttcgattaaatttgtgatggaagtagttagtagcaactggcaaaacgactatgcgcgtaaagtcgaagactacgcaattttaggtattcctgaatattggattgcggattatgcaggtctgggcgggactcgacatattgggaaacccaaacaaccaaccctttccatttgtacgttagtgaaaggagagtatgaaattcagcagattcgaggcaatcaacccattacttcgctgacattcccaaatctcaaactgacagccgaacaagttttaaaggctggcagataaagtgcgatcgctcaaattagactgataaagcgagatcctttataatatactgaatagacaacatatattagacaaccattcaagtatgggagctatctatgttgttacaagaacttaaagagcagatatttaaactaccatcaagcgatcgcaaaagatcaataattgtttattcactatcaagaaatggatagctacattagagtaaagtcacccaaaatattagcaaaaatatagttttatttaacattaggagaagtaaatggaaggtaaaatatttattaataaaattaaattacaaaactttctctcctatggaagtgatgcggaagaaattgaattacaaccgctaaatgtattaattggacgtaacagtgcagggaaatctaatttaatagaagctattagtattttaaaagcaacacccacagatttaccagcaccatttcgtcaaggtggaggtattaatgaatttttatggaaaggtgaaaaaagtaattctatagctaatatagacgttatattaaattatccagaaagacatgaaaataatctacattataaattaagcataacagaagtaggacaaagattagaattagtagatgaagctatagaaaatgcacaagtctatgaaggacgacaagatgtatatttttattatcgttatcaaaatggtcggcctgttttaaatattaacacaattacagatgatggtaaggagtttagaagaaatctccgcagagaagatttaattttagatcagtcagttttatctcaaagaaaagatcctgacttatatcctgaactttcttatctgagtacagaattttctcagataggtttatatcgtcattggcaaattgggagatattcagaaccaagaaatgctcaaaaagctgatttgcctcaacatcctttattggaagatggtagtaatttaggtttgtttttaaatgatttaaaatatagattaggtagtagaaaaattattgaatatctagaaaaattttatgaagaagcggaagaattagatgtgagaatatatggcggtactgtacaaatatttattcgggaaaaagggttaattcaaccaattccagctactaggttatctgatggaacattgcgatatttgtttttaatggcgttacttttagatcctactccaccaccactaatttgtattgaagaaccagaattaggtttacatccagatattttaccaacaattgcagaattgttaattgaagcatctcagagaactcaattaattgtcaccactcattctgatgctttggtttctgcgttgagtgaatatcctgaatctgtagtagtttgtgaaagagataatacaggaactcatttaaggagacttaaacgagaaaaattaaaaaaatggttggaaaaatatactcttggtgatctttggagaataggggaacttggtggaaatagatggtgagtattcgtatttatattgagggtgctggaaatgcaaatgatgatgacgaacttttaccaatgcaacgtccaggttttagaagtaaaattattggaggtaaggaaactacaagcagtctccgtgaaggatttagtcaattttttcaagaattagttgatcttgctaaagaacaaaaaatagagtttaggatagtcatgtgcggttctcgtgcagatgcttatgaaaattttaaacggatattttctatatttctcgcaaacatactctcagcattgagcaagcacggcaagcagtattgggtttgaataacaaaaatatagtcaaatatagttagggtttgctgaataaacctaaaaccttgatatatcaaaggttagaggctgataaacacagaaattagtgcaagggttttgaagggtataccggaaaaagtgtgcattttttgggatttcaagagatggcaaagaaattttcaaatctcctcctgactcctgactcctgactcctgactcctgactcctgactcctgactcctatgccctcacggaaagactttctcagcaacccctagttatttatctacatcagtcatgtgaggtgggaatgattgataaagtgtgatcacctaacgcattaaatcgccaatataagtcccaatttgtttaagtccctgcaaaacttgtatacgttctgatgtattttcaagtaaccgataagtatgcgatcgcgtatattgaggggcatcttggctgcgatcgcatttcaaaaacaatacttctctgccatttgtcaccattccataacaacttgactgcaaattaggagcgctcaacaagtaggtgagtgcttgaggaattcctgcggtaacgtctagccttgcaggttttgattcgattaccaaaatccaaaaactatcttggattaccaaaatatcaattctgccttgaaccaccatagcattagcttcgtcagcaacttcgatattggtgcttacttctgcttttaccaaaaaaggagattgatagaaaccagccaaatctagcaatggcgataccacgacaagcttaacaatttcttcgagtggtgcttcctcttgactgagataggtatagttacgagtgaggcgatctagtccttgtagttccgcttcggttagagtcggcgcattatttaaccattcatcaaaaaagcgatcgctagaattgagtctcaagccaaaggtttgacggagattgctaagggtaaggctactagcatttgtaatcacagttaaatccttgtagcaattacatgaattttagaagtttaggaattttatctaggttctaatacttaatatacgatacatacgaagaaaagagcgatcgcgttcgcaaagcgtctcggagggaactatcgctctgcgggaatcgccaatctataattattaagtgatcgctgtataagaaatcatcagagtaaataatattgtgatattttggtgttgagttggggtgatcgcttgccgcagggtgttatacggaaaaattctgtataatactaataacgacaggtaatatcagtaacaaacaaattgaacagctttttctacaaaatattactcaaataatcgaattgtttttgacctatgattttttagaaatgaccagagatattttgattattcattagtgcgagttcactatttatggaaatactacaaattaactcctttttctgctaataactgtcttaatctagctaattctgcttccgctaaatctgcacgctgcttttcctgttctgcacgttgcttttcttgttccacaggtgtaggcaaccagttattatctcgatcataccaacgtagccacgatctagttaatccttgatattctccatgccataagcctaaacccaattctgcttcttctaaccatacccctagtccatttattgacaaaggctgataacgactcattaccaacccaaaacaattaaactcatctgtataacggttataaacaaaataataggggattctcaggatttgttcataaactgaccatttattaggcggttgattaacttcccttaaacttctacctaaatcttccgcttccgtacctggtgagatcaattctatagccacaaaaggatttattccctcctgccaagtaacgtaacttaatctgagttctgtctgttgataaaatcgagacacccccaacaccgcaaaccaatcagggcgtttataccattggggatggagaggatcataatataagtttaaatcactgcctgtaaatatattatcttcagtataggtaggtggacgaaacgtaaggcgtaataattcaggttgtaataggtgaaattcatctggcaatccccgttcctcctgattttcactaggtaaatcatacattgtaggcaatgcttcttggggagataatggaggatctatttgatacatgattgattagctccctgcgttagcgtcgctgattgaggataaggttcgcaatttgagcatttaaacttattataaccacctagctgaacatagatgcgaccacaggaggacacggttgctgattcctatatgtttttagatggggcgaatgtggaaagattagctagaatgattaaagaataggcacaacaagcatagtttattgttgtcagtttgcgccttccgatgataaaatcagccgaacgtacaattgaacgtacaattggcgtaactcaacctcaaggtgataagcaaaaggcaaaaggcaagagtagaataatattctgaccaattacccatgaccaattacccatgaccaatcaccaatcaccttgattttctgttaaaaatagtttatatacaaaccggattcgagattgcctacggcacgctaagataacaggacgacctatagaatgacctccgaacaaataattagacgttccgatatattaaacacccaagtaattacccgcgataatggcaaaaggctgggtatcgtgagtcaactttgggtagacattgatcaaagagaggttgtggcgcttgggttgcgagacagcctgatctctatctctggactgcctcgccaaatgtatcttagcagtatcaaccaaatcggtgatgtgatcttggttgataacgaagatgtgatcgaagatgttgatgtggaagctctcagtaacttgatgaactgggaagtgatcactgaaacaggggaagtattaggcagagttaggggctttaaattcaatggcgaaagtggtaaaatttactctatcgtcatcgcctccttgggagtaccccaaatacctgaccagtttttgagtacctacgaaatatccatagatgaagttgtcagcaccggaccgagtagactaattgtatttgaaggtgcagaagaacgggtaaaccagttaacagtcggtgttttagaacggttgggtattggtagagcgccttgggaaagagatgcagaagaagaatatggttattctgcaccccgcgcagtttctccagcaaaccagttacctagcggagtaccattagaaccaccccggccaaaagttcgcactcctgaacctgtagcacagaaagaggaagaatggacggaagattatatagaagaagaaataccacagcgtcgggtaatggaagcccgcgcttacgaatccatacgctacgaagaggaagaagaagataactggagtgaagcaacgagtagcgatagatatcaagcaccagcacctaaaaaaccagcacctcaaccctacagcaaaacctacgctgatgaatatgatgattatgatgatgtagaaggtgatgcttgggatgatgcacccaaacctgtgaatattcctaagaaggtgaaggaaagacaggtggaatacgaggaagaaggcggatattaagttttgtgaacccccactactaagagttagagggggttttgattaatgaaacttcaaaattaactatggtgtaatcacagacttagccatttctaccaaatctttctgcttacctgcttttatgccaatagtatactgtactcccttttgtcgccaggttaaggtagaatcagaacaattagcaccacatttagcatctacaaaataagcagttgtacctttagttaaagataccgctttaccagttagtctaggggttttactattaatagcttccgcactaatcataccaaaacggcaagctgtacctccagtacaatcagggctaaatcctaataaaatatcatacttgtttttgtcggctgtttcgataattgcgtaaagtgggttttccccttctaaaccaggaatatagttaggtaataaaattgtaattttcgtgtttttctttaatttgggcaaaatagatttaaaaactggatgaagttgagcagttttattattaacctgctgttttgctattacctgcggctgattttttaccgatgcttgagcaatatcatgaaaatagctggtactaactaggaaaaataaagctaacaaagcactactttttttaaaattgaaaatcatatccacacacctgggtcattaacaagaatattacaaatataacacgcagaaaccaggtttcttagcatgattacaaatattctgactcctgactcctgacattctttaaaaatttaaaatatctaaagattcttcaatttctaaatctaaaataatcgcttgagtatctttatgttcttctatttttccattttgccaatacaaatccgctgctttctggaaatcttcaattgctccctgtttatctcctataattaatctggcatttcctcgatgataataagcatctgtataattaggtttaattttgatcactttactaaaatcattgattgctgcttcatagttgcctaaatcaaaatgagcattaccacgatcataataaatatcttgatcattagcatttatcttaattgcctgattataatcttcaattgctccttcatactcccctaattcataacgaatattacctcgatttttataatcaataatatcatcattattgtccagaaaatcatcctgtgattcaatttctttgattatttttttctgttcatagaaaatctgcggattttgtgaatctatatgctcattatctatagcagtggggaaattttctaaataagataataaacctccaccgtataataattgatggataccaaaggaaattttaccagtttttaatttaatcattgttgtaggtaaaaatcctgctaaaaataaatgatattctgattgtgcttcattaacttcttgtttaattaaaatacaaacaataactgtatttttttcaacttcctctgcacttaccgaccatcttacctgctcaattgtaccatgacgagatttaacttgtatacgaatttccggatttttagttagtgtaaaatcatgtcttccatctcctcccattcgtttttcataatcaacttctgtaattaaatctgctaaacgttctttaacaacttcttcacctaatttacctttaagattactaataaaaacgttacgaactggggaagtacgtttatatttttctgccattaaccagcaaaaatttcttaatatttttaatctttctcctgaaataatagttaattcactatgatttcctggtgtttcacagtgcagtaaacaaccagaatttaatcttttaataaaatcagattgtagcgatcgcaataaagtaatccaatccatttatcattggtaattggtaattggtaattggtaattggtaattggtaattggtaattgcgttatttatctttttcccaatcaccagtcacctgtcacctgtcacctacttcctaaaatgttacctgttcaccaggtttagctgcaataactcgtgtagataaattgtttttttctaataattcctgaaattctgccacacttccctttgcttgcaaaaagttgtttaatacaccctcaaattgaacatctccaccagcagcagtaggaataataattcgcggttgtaaccatttagcaacttctaaagcacttttcattcctttaattattggtagtcccaaaggtaaacttaaatcaataattggtgtaattaccacatctactggtgcaaactgctggagttggtttgaatgatttccatgcggttcataatacaattttccaccagttgctaactctgtgatcagatacccattttctaacaaagttggtccaatttgagaaccgggaaaagctttaatttctacttgactatttaaagtgaaagtctcaccatgatcaagagaggttatatttttataacccaattcttttactactttagttgcattgggagacgcgacaacttgaatattcttgtccaattttctcaaagtggggggatgtgcatgatcctccaaaccttgagacaacaaaatcaaatctatattttctggtatttgtcgatcttgcgttcgagaacctttaaataaccaatctaaattattaaaggttaatgagtccaccaaccaaggatctaaaagtatccgctgtccaccaatttccattaaccaactattgctgtctaaccaagtgaaatacataactttgaaggtagtaagagtagtgctgatttttattattaattataatattaattataatattaattataatatttatgatagttttactaactgatcacactgattttaaacacgaatacacagcttgttaattacgaattatcaattgtcaattgtcaattatcaattgtcaattgtcaattgtccttcgctcctaatatttgtaatagtttttccacattatctatatctcctactatacgccgaattggatgaggccaaaccttaacaagtgtaggagttgccgaaacctgatcaatttctgcttgctctggatgtgttaaaacatcaattaccttgagggtgtaaggataaccaagcgatcgctctaataaatcgtgtaaattttctaaaatgcgctcagtattcatactatgaccagcaacaaacaaacgcaatacataaccttgaccattcaattttccctgttgtggatgtaaatgattttgctgatatcgggatggtatatctgcacgatctaaacgcacaattaaatcatgatcttcccagagttgagggaaagaagaacgataagtagctaacaccatgcgatcgcacaaaccctcttgccaaggtgctgtttgccacactatatcccccgtcccaaaaattgccctcagcaccgactgatgacgcatcactgctggataagcttccgcaaaagtctgtactttttgtgtccgtggatttaaccaatgatcaatagtagctgtataacaaggtactaaaaaatgtggcggctctgataaatccagaatttcctgcaaagccgcacacagatgtaaatgccatcgaccttgcttactagggtcaatacagtaaattaaatctccccctggtgtaaaaagagcaatacccttaaacaactggggtgtagatagtttgtctgtagttagcttggtcattatgttttttcagggaatagggaacagggaatagggaatagggaataggggagaaaaattttagattttagattttagattttagattggagttgacaaaaacaatccaaaatccttgcatccaaaatccaaaataaaacactcctgcttcctgccttctgccttctgcctcctgcctcctgactcctgactcctgcctccttgttaaacacgacctctgaggaattgcatcatttcattaggagttggtgacatttcaatagcggtttcctcagtaatgcgaccttcctgatagagattgaataaagcctgattcatggtaatcatgccatcaaaaccggcttgtttcatcaactccccaatttcatcatacttagcatctttaatccattctttaacagcctcagtgttaatcaggatatcgtggaaagctgcccgtttaccatcggtcgtgcgacacaaaccttgagcaattaccgccactaaagactcagaaagcgccacccgcatagcatcttgttcttcaccagagtacaaattaagaatccgttcaatagttttcaccgcgctgttagtgtgcagtgttcccataaccaagtgaccagtttgagccgctttcaaggcagtattcaccgtttctttatcccgcatttcccccaccagaatcaaatctgggtcttcccgcaaagctgctttcaaggcgttgtcaaacttacgagtgtgcattcccacctcccgctgcttgaccaaagacttacgactttgatgcacaaattcaataggatcttcaatagtgatgatatgcttgggcatttctcggttgatgtagtcaaccattgccgccattgtcgtagatttaccagaaccagtaggaccagtcaccaaaatcaaacctttgtgataatggcaaatatcccgaaaaatcggcggtaatctcaactgatcaattgacaatattttcaagggaattaaccgcagcaccattgcataaccgcgcaaagagtcaaaaacgttaatccgtacacgggcaaattcgtactgagtcgcaccgtcaaattccaggttatcctgaaagcgttggatttctgcatcagtcatgatctcatgcaaccaattaacaaaagttgctttatccgtttctggatagttcgttacttgaatttctcctcggttacggaaacggggtatttcacctatccccaagtgaacgtcagaatatccttgatcaaaagcttcttgaacaatttgagctagggtcagtcccgcaggtggtttagaacttgccggaactgttgcccttggtgctgccattggtggtggtgctactggacgttgacctgctactgggggaggtggtggtgcattgccagctggtgaacctactctgggattctgcaacatttgtgtactattgcgttgtgtcatagatgttgctaccggtggcgctggtggtgctggtggtgctggtggtttgggtggtagattgcgagatggtaattctgtcatattatcttcaacttgggtaaatcaaaaatgaaatcgacaattaatttcttgatgaatcacaaaagacctctccaaaatagaatgtattaatttgtcataagttgtaggggcgaagcttatgggcgataatttaacggaaaaatcagacatctagatatcccaaatgcttcgacctgcccccataaataggttccataatttcttttctggagatgtctaaagcactattttgagtttaagcctgggaaattaagcacagcagtcagtttgagttcatccacctccatctgtgtttttttcgcagctaattccaggatttacaggatttattagttatatacaaattctttcatcaatataacctggttttacacaggttaaccttcagtattaaaacgtaaatatttctgtaatgctatgtaatttttctaccttaaattacaaatacctaatttttctacccccaaatgagaaattcaccagctataaaaggcagcagggaagaggatttgcggcaactttacttttagttacatactgcggttttttacgcctttctacttaggacttaggcaagattggactaaaaacctgattcttgcgtaggggtaattcatgattacccctgctttcgttctgttttgcatcagtcctgcataactttttcaacccagtctcttgaattatgagaagtaatcctaattttgataagaaatgttaagtaaagcaggtcattaatttcggagatcatgattggactattctctgcacaaggttatattcctcaagatatatgctcaagcaagactgactacacaaaggggcatttgaggagatatccataattacaaaaaataaactgtaaagtttagtaaagaaatgctcatcttttccataagtttctatatactggatttcactgaatcaaaacagttaactcgtcaacagcgaggcacaactgaaattcaaatttaaactttgctgtgtatttgggaggaaaagtcatggtttcggctcaaagctctaatcaagggaagacctactccttgttaatgattaaaagctttttaatctggactttcacattggcagtatgtttgttggttgtcggttttccattagttgtagtaatggctacggtcggatgcctgttgtcgatagtcctacaatctgtaatgcctgtcagtgctgtgttgctggtagcaggtggtttaatcatgttcaatgttttgacagttttgatcgtggctggtgtactaactgctaaaggcattcatcccaaggaagttaaatggttaagctggctacatggtgaggcagaaaaagcgcaaaccacggtttatgctgcttgtcctttaacttgcgaactcaaataaataacattactaaattcgacaaacagtgcatctgcccggttaagccgggttttttcatgtttgagggaacaggtgactggggactggtgactggggactggtgactgggtaaaaataactaataactaataactaatgactaataactaataactaatgacaaaagtctcatgtctaatgtctaatatctaatgactaatgactaataactaatgactaaaaaaattggcattattttaggtactcgtcctgaagcgattaaactagcaccagtaattcaggttttccaaagttctccagatgtggaagtacaggttattcttacaggacagcatcgggagatggttgcacaggtgatgcagctattcaacctcaaggaagatcataatttagagattatgcagcctaaacaatctctcaatgatattacttgtaggagtttgcaaggtttagaagctttatttaaagaactaaatttagatttagttatagtccaaggagatacaacaactgcttttgcagctgctttggcagctttttatcaaaaaattcccgtgggtcatgtggaagcggggttaagaactgatgatttatttaatccttatccagaagaagcaaatagaaggttaatttcccaaattactcaattacattttgcccctacttccttagctgtggcaaacttgcaagcttcaggagttttgggagaaattcacttaacgggtaatacagtaattgatgcgttattgaatgtggctgcaactaacccagcttgtgagataccaggtttaaactggggtaaatatcggacaattttggctacagtgcatcgtcgggaaaattggggtgaaccactacaagcgatcgcccaatcatttttacagattttagacaaatttcctgataccgctttattactgcctttacacaaaaaccccactgtgagagaacccttacagcaattattgggtaaacatccccggatctttttgacagaaccattagattatggtgaattagtaggagcaatagggcgatcgcaccttttattaacagactctggtggtttacaagaagaagctcccagtctcggtaaacccgtgttagttctcagagacaccacagaaagaccagaagctgtcaccgcagggacagctaaactggtgggaacggaaactgaaagtattgttactgctgctagtgagttactgactaacccagaagcctatacagcaatggctaatgctattaacccctttggtgacggccatgcagcagaacgcatcttgcaaattgtgaaaaattatttgagaattagtaattggtaatgggtaattggtaattggtaattggtgattgggtaaattatcaattatcaattatcaattatcaattatcaattatcaattatcaattattaattgatacccaaagccctgcgagtagtaggaccaactataccatctacaagcaaaccatttcggcgttgaaaattgcgaactgcactagcagtgctagatccataaacaccatcaactctgatccctaaagctctttgcacggttctcacacgctcacctctagcacctggtcttaataatactcgaccaccaacaccaacccctgaatgacgacgatatctaccaggagtagtacctagccatctttccgcaacataatatccttggtaaggtccagaagtaatttgagcaaaaccatttctcacattaccagtattgccaatatttgtaccattaggtacacaagctacagatgagttagcagtgctaggaccactacggataaataaacaactaccattagttctgacatattcggcggaagcttgctgaaggggagcaagggaagcaacaaaaacactcacaccagctaacgctaaccaagcagaagacttgagtaatttttgccaattaaactgcaatttgggcaaattcaattctaaattaaccggagtctcttcattagccatgtacatataggaataagccatatattccatgattttctgctcctttatgtaaataattgggatattgcaaaaaatgactttgcttttttctagatttaatctagatgtattttatactcctaatttagcagagttgttaataccttattccggcctttcaactgtcacagtactgtatttttaagtaatcatcacatactgaactaaacagtatttttaattgctagttaattagggtttgctgagaaagtctttccgtgagggcataggagtcaggagtcaggagtcaggaggagatttgaaaatttctttgccatctcttgaaatcccaaaaaatgcacactttttccggtatacccttcaaaacccttgcactaatttctgtgtttatcagcctctaacctttgatatatcaaggttttaagtttattcagcaaaccctaattactagcttgctggaaattatcaaaattatcagaacgaatttgactaccattgcgccatacttctactttttctggactaactaagtaagaaaaagaaccgttatctgctcgatatttattttcaccaacattccaagcaagtatcttgacagcttgactcgtatcttgctttaattgcccaatataaaaaagttgaccattttcgttacagacttgaatacgagcttttgcagtttcacctgtgatcactataattccagtacattcgtgattaacttttacgggtgaaacattgatgggaacgggttgtgaaggtgaaactggtttctctaagggtagtttagcagtggtggaagatgataaaagtttcagaggatcaattgctaatcgactattttgataaaattcaaaatgcaaatgaggcgctgtactgttacctgttgatcccatttctgcaataatttgtccttgagtcaccgtttgacctttgctaactaacaaacgattattgtgaccatatactgtcatagtaccatcggggtgtttaatttcaataaaattacctaatccccaatcatcccaaccagcttttaccactttaccagatgcagccgcataaataggagttcccatagcacctgcaatatcaattccttcatgttgatgtttacggaaaccttgggaaattatcccctgagtcggccaaattaagttgctactaggtaaaggactttggttaactgcggaagctttgactactggaggtaatgcagaggtagttgtactaataacagttgttaaagatatcaaccctatcaagatataagcacataatcgagaaatagtatttttgttcataaaaaactctactctcaagttcttttctaaagttctttatttgctgtttcagcattactcacctagtatcaggaaaattgttaccatacggtatgtttataagaaaatcgagtaagccaaaaccacgcccgatcaagtatcggaacttggtggacatactttatcgaaccctgatgaatgtggatatgaatttggcagatggacatcatcaagactagcgacatatctagaaatagagacaggaataaagttaagtagttcgcaagtaaggagaattttagagagaaaaaattagggagcatcccaaatgtgtaaatttatttttatctagggaaataaaatgctccaagacttgatatgattgaaccgcaaagacgagccagtgcgttgggcggctctgccgacttgtagcaactggcgtgcaaaggacacaaaggtaagagattgtgagagattttttagtgttgctgcgtttattttgtcaaaattgggatgctgccaaaaattacgtttacctttgggcaaattacagtctagagaacaaacaaaatccagagaaacgtagattatttaaagagaaattagccgaatctttaagaataacaaaatcagccccagagcgtttacaggtatggttttgggacgagagcgcatttagtttaagagtgataaaaagaaaaatatattaacgtatccatcactgagttgtcaagtaatttacagaaactaaataaaacccttatcccataataaatactggcattattcattattgacaagtttaaaaaagaagtcggggatctaaaatccagatttcatcaaaaaaataaacccccgacttcccaaagaaatcgaggatttaagtaaaatagcatttaccaagttagtgaggtacagagttttttatcttagggaattgggaattgggaattgggaattgagaataaattagggtgtacctcatgagactgggaaacgctatattcagttaacagtattcaattaaacagccactaattccttagtaggaggcttactgttacgaatgttattgattgcttctgcataatcaggagcgttaaacacagcagaacccgctacaatagcattagcgccggcttccaaaacttgccaagtgttattggctttgagtccaccgtcaacttcgatccaaggatctaaaccgcgttcatcacacatttgacgcagtttacgaattttgggaactacgctaggaataaagctttgtccaccgaaaccggggttaacgctcataattagcactaaatcacacagttccagtacatattcaattaattctaaaggtgtaccggggtttagcacaacaccagcttgtttaccgagttctttgatttgtcccaaagtccggtgtaagtgaggtgaagcgttatgttcagcgtgtacagaaataatatccgcaccagctttagcaaaaccttctacatatttttctggttccacaatcattaaatggacatccagaggtttggttgtaatcggacgaatcgcctccacaaccagaggaccgattgtaatattaggtacaaaacgtccgtccattacatcaacgtgaatccaatctgctcccgctttgtctacagcacgaatatcgtcacccagacgactaaaatctgctgataggatagatggagagataactataggcttttgagatgggttttgggtcatggttagcgggttcttaatcgtccttgtctgtaggcattgtaacaaaatatggattttttggaaattggtaattggggattggggattggggactggtgactggggactggtgactggtgactggggactggtgactggggactggtgactggggactggggactggtgactggggattggtgactggggactgggaagaaagtaaccaataactaatgactatgaaaaaattctggataatctgcggtttggctgtttcctgtttaactgtgcctgtattggcatttgtaaagttgagcagttctctgggcagtagtggtattgatgcacttaaattacatcaaccaccatacaatttaactgggcgcaaaattgcgatcggtcaggtagaaatcggtcgtcctggtatgtttgggttagataaagcagtctctaaaaatcgcgctatttctcctgtagcagtgtttttacgcaatacaccagctaaatcaaattctggtgtagaccctcatgcttataatgtggctacggtgatgatcagtaaagataaagcttggacaggagttgcaccagacgcaaaattatattcttctgcggtgggatctaccagaaatatgggtcaagcggaagagtgtttatccactcaacatatagcattacaaaatggtggtgatgttcgtgcgattaactttagttttggtgaacctttgtaccgtgatcctcgaccaaatgcggttttagatggtcaagctttgctgagtttatgtattgactggtcaagtcgggtgcataatgtggtgtatgcgatcgccggaaatcaaggcaaaggtgggattcccattcctacagataattttaacgcaatgaacgtggctttttcatctgctagggagggaatttttaataaagttcatgtttctaatttagcaggaaataatcaaggagtaggcgatcgcctcgcaggtaaagaatttaatattggtggacgcagatccattggtttagttgctcctggtactaatattcctgtaattaatcccgatggtaaattaaacaacgctacaggttcaagttttgctgctcctcacctaacagctaccattgcattattacaagaatttgccgatagacagttaagaattaaacaaccaaattggactattgatgcaagaaatcatcaagttatgaaagctgtattattaaattcagcagaaaagattcaagacagtggtgatggtttgcggttgggaatgaccaagactttagttgataagcaaaatcgagattggtttatttccgatgcttacaaaaatcccaaaattcccttagatgatcaaatgggtgctggacatttaaacgcctttcgtgcctatcaacaatttatgtttggtcaatggcaacctaccacacctgttccggctattggttgggattataacaaaattaatgctaattctgccttagaatatagtttagaaaaaccattaaaacaaaatagttttgtagctgtcaccttaacttgggatcgattagtagaattaaatgataaaaaccaaaatcaattatatgatgaagatgaaacttttatagataaaggtttaaatgatctagatttatttctagtatcagcagatggacaaaaaacggaaatttctacttgtgcttctgtgagtgaaattgataatgtagagcatattttttgtcctgttcctgctaatggtaaatataaaattcgtgtgcagtttcaacaacaagtcaacgaaccaactcaagcttattccttagcatggtggacagttcccggaaattagttattttgataatagtggttaaaatcacctcattataactaatataaaatcatcatgaagtatgtaagggtttagcactgctaaaaccctaataatttctgattcgtgaattataatgaattacggatgagaacctactgttaaaggttctggaagttgtcttccttgtaattgatattcttcaattaaaagttctaaaacttcttctccattctttagtgcttcagcataagtttctccgtgggtatgggcataaggtccaaactctggtaagctaactatatatttttgatcttcatcagaccactgaattaaaatactataatggtgattcagcacaagtaaaaatccttgatcaaaacaatctttctttcagcttttatactgttccccctttttccagggtgtgagaggtgatttaaatcaaactttcaggatcaactcctaaattcttcaacatttcagctaattttttcgctttttcttcagcttgattccttttttcttcactttgttgaatcctttcctctggtgttaaaaatctttatccactggtgtttcgtcggagtcgggtagttcttctgatgaaggtaagcaatgcaaaggattgtaatttagcataattgatgccaccagttctatttttagtatatattacgtaggtgactggggactggggactggtgactgggaaaaaaatttgagatttgagattggatctgacaaaaataatccaaaatctaaaatcccaaatccaaaatccaaaattaataactcctgactcttaaattaagttatgaaaacataacgtaaaaatccgttaccaaaactgtaaccagcaaggatttatgtattttgtatgcgatagtgaacatctaacacatcattaacgtctaactaaacagaaagctagaacaaaaaatgaggtagtagatgaaccgacaaaaatttaatgctgtgcaagaaaattttttacaaagacgctacggagtcagtttgggtagacgctacgttttagcagcagctagtattgtgatgctgagtgtattgggatattcagcagtagataacaatacaaatttaatcagtaaatcttccccaagcaacactgaatctctcttagctggagataattagtatcaattatgatgctacctaactccttttaataatgtgtaccggttttgcgatggttaacagcagttacagtatccggtttgagtaatttaccattatctacagtggcatatactacccaatgatcaccacattctagacgttggttaacggaacattctaaatatgcagcagcatcagtcaggactgcacaaccattatcagcttctaccgtttggaaattagcaaacctgtcttctccgggagcgaaatttttgcgaaaatgcctcatgtagtctacatgaacaccatccggaagaacattcaggacaaacttaccaccaggatacatcaatgattcaactgctctttccttggcgatcgccactgtaattcctggaggattaaaagtagcttgagatacccatgtccccagcattgctgtggaaacttccccttgtttagctgcaactacacatacagaaccaactattctccctactgcttgttctgtgggtgttgctgcttgttgtggtacacgaatttttttcgcttttttcaaactttgtgcaaagtctgtacctatttcttcgcacattttcagggtgacttcatcgggtttaaacttgactttcaaagtgtcaaacccaaaccgatatcccccatctcgcagtttaccttctactaagtctaaagcttctccactccaaccataagaaccaaacacacctgctaatttactattatcaccaatagctaaaacaatacctaaagcagtgtgaataggtgtgggagcatgaccaccgatggtaggagtaccaataataaacgcatctgcttgttctacagtaccacgaatttctccagggctggcaaattcgcaattaatagattttaccgcaactccacctttagttaatccccaagcgatcgcctgtgctaaagtggcagtgttaccataagcagaagcataaagtaacgctacggaaatttcccgatctttttgagcgcgactccattcactataagctttagttaattctatcaacccagtgcgaatcaatggaccatgtcctactgcatacatcctcacctgcaaatcagaaattttttctaatgcagcttcgacatgagttgcatggggagccatcaaacaattaaagtaataacgctgatcttctttaaaagcttctgaattatcatcaaaaacttcatcaccgcagatatgcgacccaaataatttatcagtatagagaatttgggtttgttgatcataggtgcaaagtgcttctggccaacggggactaggagtaggtaagaatttcaaaacatgacctttacctaaatctaaagtttctttcccccgcataatcaaaactttaatatcttgatctgggaaagatgcacgcaaattatttgcaccaaccatagaacaaacaaaagtaatttgcggtgcaagttctaacagtgcttttaaagttggtatacgattagggctaaaatgacccaaaatcacataatctaactttctcaaattaactgtattctgcaatgctgcaaaataaatattagtaaatccttctcccggaggatcaattaatgcagttttatcggcttctattaaatagcaatttgcggtagttcctcgacaaagtgcatattcaacttcaaaccttagacgtgaccaactcctagctctgagaactttggtattggtggcgatcggtaaaatttgtacgtcccgtggtttggaatctgtcatagatttttcttgtgaataaaaaacttgagaaacccaatttttagctgagttgaaagcattagaaacagaatcagaaaatgacataatatttatcaaatattattggtaattggtaatgggtaatgggtaatgggtaatgggtaatgggtaatgggtaattaattatttacagtccccagtcc

SEQ ID NO: 68 - DNA, 29689 bp, Sphaerospermopsis sp. LEGE 00249
  LEGE00249_84
tgttgtttgtacccgtaaccgggttgtggatgagttcagtaggtatcgtgggtttagcattaaacctgcgggcttatgacttcgtttcccaagaattacgggcagcagaagacccagaatttgaaaccttctataccaaaaacattttgttgaacgagggtatccgtgcttggatggctcctcaagaccaaccccacgaacaatttgtattccctgaagaagtattaccacgtggtaacgctctctaatttgatgatgaattaatcaaatcctttagtattcatcctttttaatttacccccaggctatttattagcccggggttttttaatggtcattaagctgttacacagcttaatgttctgaactcttgtttaacaggcaagatgcctgttccacttatacaaattaaatgcacaacaacttagtcattagcggttagcggtcattattgatttttacccagtcaccagtcaccagtcaccagtcaccagtcaccagtcaccaatcaccaatcaccaatcacctcctgactattgccaaaataattttctgtgttatgataattcaaggttcacaaacccagagtttttttgctctgcctttttgaaactaagaccgtttaggcaacaaggaggtgatgcccatgatagaaagtagtaaaagcatgggtcatcaggttgcagttagccggctgtgcgccggggctgttctctaaaagttagccttagttatcctgagatttagttcttctgagatactaagttagctcaagtagctaggctaaaagtcggagttccttccggcagtctggttgcaacctgaagacccgctagaccgccctgagttagatcatcagatttaatttagggcggatagtcttttatggttttattgtttttcaatgctgcaattattttatttatttttagaatctcttcactaatacatatatatattgtttccaagttaaacaattagctagggcttatttaaaaaaatttagctgcgcttcatggaacattcagacttggcaggacatcctcacaatagaaaaaggtttttgctaatagaggaaattgtccaatggcaacagcaaagaaatttaatctaacagatgtgattgtttaaatcagttgcaaacacttttggcaaaagctgctgttatgtttttgtcctgtatatctgttatgtttttgtcctgtatatctgtggtgtgagttgaaaatagttaattgcttggttgtgattgagaatatgataccagcttatttgcgcggtatttaattgataaattttatcttgatcattaggctgagatattttataatataaaactatgatttagatgcttttacataagttaattgcatgattttttaacgattcgttaatcattttttaactttgtaaaaactaaaattgtagtagtggcagctatgcctcatccacaggtcgcaaaaagatatcgcatttcggataagtaggtactacataaacagtcatctataaacggtgtgaggagtaaaagtaaagatgtctaatctcttgtggaagtctctggtggttagcccagcagttttaggagcagcgttattagtttcaggaacagctgttgccgctgcaaatgccaccactgaagtatcaacactggaaactcaagccgctacagaagtttcccaacagcctgaagttttagttccagtcgcttcagaaacgaaagttttggcccaggttcagaactacagcaacgaaggtcaaaatttacagtcgcaagttacatcagtatctcagttttctgatgttcagcccactgattgggcattccaagcattgcagtctttggtagaaagatatggctgtattgcgggttatcccaatggtacatatcgcggcaaccgggcgttaactcgttatgaatttgctgctggtttaaatgcttgtttagatcgtgttaacgaattgatcgccacagcaacagctgatttggtgacaaaacaggatttagcgactttacagcgtctgcaagaagaattttctgcggaactggcaactttacggggtcgtgtagatactttggaagcccgtactgctgagttagaagcgaatcaattctctactactactaaattacaaggtgaagctatttttgctgtcaccgattctttgggcgctactcctcctggacaaactgttttgcagaacagagttcgtttgaacctgcaaagcagcttcactggtagagatatgttgaatactcgtttgactgcgggtaatgcccaaggttttggaaccacagcagaaactaaccaaacctttgaagttggtagcactggtaataacaatgttgagattgacaaactgacttatgaagctcctatgggtcctgcacaggtctatatagcagctactggtggtcagcatagccattatgcagcagttaacaacccttacttctttgataaaacagatggcggtaatggtgctttaagtacctttagttcggaaaatcccatctatagaattggtggtggttcaggtattgctgttaatgtaccctttggacaaggcggcggtattctcaaaccaagttcattaactttaggttacttggcttctggaaacacaacttctggcgctgaaaaccctgctaatggtgcaggtttgtttgatggtaactatgcggctttaggtcagttaaacttcaatgttggtaatcgtcttgctttagctgctacctatgtacatggttatcatggtgctggtagtaccttttttgatgcaggacgtgatggaggtgctgttgtcggtacaacactagctaataatctgagttcaccaagcggctcttccagtaactcctacggtgtttccgcagcgttcaaacccagccaaagactatctatcagtggtttcctttcttaccacgatattacaggctttgctgcaaatgatgattttgaagcttggagttatggagttggggtagcgttacctgactttggtaagagagggaacgtattaggtattttcggtggcgttcaaccctatacctttaataatgctggtggtcctaacactggtgatatgccttaccaagttgaaggtttctacaagtatcgcgtctccgacaatatctctgtcacccctggtgtgatttggttacctgctgttggacagaacagcaatagccaggatgcctttattggaactctcagaacaacgtttactttctaaatgatagcgttgatagtctgctaacaatcttttaatctttttttgcccgccatgaggcgggttttttgttttgatcagcaaaaacctgtcttcaaaaacggttttatagccgtatacaaaaaggttaggtttgggcaattaaccaaaactgaaactaagtacccaagcaaaattaatttaacatattgattgaaaaccaaaatgcctgtattccttacctgttgcctgttaagagttccctctcctaactgattgctgatggctgatagctgaatactcaaaaaaagtacaaaccccagtgtaaaaccggagtatactggaaaagtatgaattatgaattattcatgaacctttatccttaactgctgcttgtggaactatcctgtaaatctgaatacgcaattctggcgttattagaaatggcaactcattacgaaagcggcgaaccgatgcaaattcgacaaattgccgcccaacaagatataccagatcgctatttagaacagctacttgctactttgaggcgtgggggtatagttaaaagtcaacgtggttcaaaaggtggctatctgttagcgcgagaaccttggaaaatcagcgtttttgatattttggaatgtttagaagggttggatatcaagacaggggaagatgataataaccccaaaagtgtagatagtgccattgtagaagaaatttggcaagaagcgcgtcaggctgcaaatgcagtcttacaaaaatattcgcttcaggatctttgtgaacggcgagattcacggaggcaattagatatcatgtactacatctaaaggaatcaaaagttattatgcgggttgctcgaaatattacagaattggttggacggactcccttggtgcagttaaaccgtattccccaggaagaaggttgtgtagcacagattttgctgaaactggaaagtatgaacccatcggcatcggtgaaagaccgcatcggtgtgagtatgattaatgatgccgaacgggaaggtttaatcactcctagtaagacggtgttggtagaaccgacatcgggaaatacgggtattgctttggcaatgacagcggcggctaaggggtataaattaattttgactatgccggaaaccatgagtgctgaacgtcgggcaatgctacgtgcctatggggcagaattggaattaacaccgggtattgaggggatgagtggagcgattcgcagagcgcaggaaattgtggaaaccacaccacactcatatatgttgcaacagttccgcaatcctgctaatcctaaaatacatcgagaaactacagctttggaaatctgggaagataccgatggccaggtagacatgattgtggcgggtgtgggtactggtggtactattactggtgtggcggaagttttgaaggcaaagaaacctagttttcaggcgatcgctgttgaacctgctaatagtcctgtgttatctggtggtaaaccaggaccccataaaattcagggtattggggcgggttttgttccccaagttttgaatgtaaaattgattgatgagataatttctgtcactgatgaagaggcgatcgctttcagtcgcaggttagctagggaagaaggactattatcgggaatttctagtggtgctgctttatgtgctgctattcgtgtcgcccaacgtccagaaaatgcaggacgtttaatagtcatgattcaaccaagttttggtgaaagatatttgagtacacctttgtttcaggatttagaagctaagacgttaaactaagaattcaggagtcaggagtcgtaggggcgaagcattcggacgaccaattatcaatttgtgtccaaggctattttcccaatgcttcgcccgtacaggagtcagtgaacagtgaacagattaataataaaatttattgataactaattactgatgactgataactgataattgaatcatggaagattctaaccattacaaaaccctgaaagttgatgctaatgccagccaagcggagattaaacaagcatatcgccgcttggtaaaaatgtttcatcctgacagtaatcaggaaacagctaatcatgaggaaattattagaattaatgctgcttatgaagttttgagtgatgttcaaagtcgtctaaaatacgatgaacaaattagaaaagatgcccaaaaatcaaatattcatcgtcaagaaagaactgcatctgctcaaaaacaatataaagctaaaaaacaatctggaaaagatgcagatgaaaaagttgaagagtggttgcgtgtagtttatcaaccgatcaaccgcgtgctttgtcgcattcttaattctttagaacagcaaattgaagacttagcagcagatccttttgatgatgagttaatagatcaatttcaagaatatttagataactgtagggatgattttaaaaaggctcaaaatacctttcgttctttaccaaaccctcctagtttagcgagagtagcagcacatctttattatagtttaaatcaagtgggtgatggtttggaagagttgggatattttcctttaaattatgatgatcgttatttgcatactggtcaagaaatgtttagaatagcgacgcggttacattgtgaagcgcaagaatcagtggggtgaaaaatggtaagaaatcaggagtcagaaagtttgatgatttttcagattttatggtaatggtaaatagactatccgatcttgatattcaccatcttctgaagctaaagcaactaatattaattcttctatattttcaccaacacttaaattaggattgagaataaaaattcctggtatgtgacgattcatggcaatatgatcagataaatgcactggcatagaagtgcggttatttgtcaccagaataaaattattttcttcacaccaacagagaatttcaggatcaagtgttcctttcggtggtattccagtttctcctactacctgaacgataatatcaggttctttgagtttaatttgttttggatataaaggatttacattttcatcaatcaaatatttaattgtcatttttttatattttcccttgtctctcttttctcagttgtctgagtttttctgatactggtgggggattcagtctttgttgttctctcattttatgaccatgttctatccaggttttcatataatttaattgtcatttttttatattttcccttgtctctcttttctcagttgtctgagtttttctgatactggtgggggattcagtctttgttgttctctcattttatgaccatgttctatccaggttttcatataatttaattgtcatttttttatattttcccttgtctctcttttctcagttgtctgagtttttctgatactggtgggggattcagtctttgttgttctctcattttatgaccatgttctatccaggttttcatataattgctgacaatttctttgttttgtaaatagtacagaattgttgcatatacctgttctaaagaaattgattgatatatttgggcgatttcttctggagaacgtccacaatcaatatattcatataaaattgtttcaattcctattcttgaatttttaagtctaatgtctccaggagaaagaaaattgaaatattcggcaatgcctttgttaggtatattttgaggaattgtttgggtgttcataaatttaacctcgtatcactcttttgtccaatgtaccaccaaaagcataaactgcgttatagccaattcttcccgagtcattttagggtaaggcatggggtaaaccttcaaattcaaattaatagacttctgtaattattataagatgcaaaccagagtcaataaatcattttgtactagaagtaagaagtttaaatcataggcgaaatttttattttccgtgtgaggcttttttcttaaaaaattaatatcttgagtaaaaaatatttaatcggtgggtaatttcattagtatttctgaaacctaaaccgactattcgcggtgttgagggaagatgtcctttatttgcatctaaagtaaaattataatcttcgtatttcatcaattcatttgtagcaatattttttatccaaccgcatctagctgtaaattgtttatgattttgaagaatctgtttttggatactaaaaccaaacttaccatcactatatttaacccaaagttgattaattatatgtaaatcatagcggggaaattttctaatgtctccatcatctaaccaacctttatcttcacgttcagatattttcagcattagagaataagtttctttatcagcatctttccagttttgtgcagataataatttccgtaaatttctataatccattcccgaagcatgagatactaaagttaattcatctgttaattgcgacaattgtaattgtaaatttgataaagcttgtacaatatttggttgttctggttgttgaatgtgagtttgtaattgtgatatttgtgctttgatatctgctaattcttggataatttgggtatttgcttgtggttcatttaacatagcttttaacttctctatttcctctgtagcttgaattaaattactcttggtttctctggctatttgttcactgctttctagtttttcttgtgtttcacgaagttgagattttaatgtttgtatttctgtttgcaaaatttgaacagtaagcaggaaattattttgagtttcttgtaattctgttctcgcatttctcaattcttctattgctttttcgtaaactcccaaaggtgttttccagttgttatcagatgtgaacataaaattaaccctattattacctgatattgattaattaccttttaacatttgttgtgaataattaccttgtaactttaattgctctggtttagaataatcagttattgtactacgccaaaattcacataataaaccatattgcatccagtcttcaattgctctacgtcttaattctggagattttctgactaaagcggccatcattgctgcattatgttgtaattgtccataggtttctaatacttgatcaataggtgtgttttcatttaatttactcaattcataacattgatttaatttataaagctgcatatcggaaatactaccgccaaatttccagccaattcctaattgttgtctacatttatctaaagggttgggtaaaacatggtgtaaatgtctttttaattcattacgaataaattctaatttaccatctattgcttcatctattttatctataagttgactcgcatctgcaaataattgattctctaaattttcgactctttgcaaactactatctacacctgcaatagcttccataactgctaatgaaagttgattaatgcgattttctaaataaaagttggtttgactaattgtttgttgtgagtctttaattacttgttctcttagtttattaatttcttctaaattccccttgactttatcgttagcatgattcagcaaattttcaatatctacttttgtctgagtttctaaatcttccatgtcttgaagacgttgttgtgatacatagtcaaattgatcagctagaggtttgagtttatgatcaaataagttggatatttcttgactaccttctttaatcacctcttttgctgcacgttcaaattttttcactacacccccaaacaaccatccgatcattttttaacaccctttcagcacaaattttaatattatttcaatatcataaatataacataaatataacactgaaatcactaattgtataataagtttacaaagaatatgagatgagcataaacattaatttagtttttaatttagtttttaatttagtttttaatttagtttttaatttacttttgtgttatttttcatcggtgaacaaaattaataatgatattatacaatactgaatccgtaggtagcgatcgcatatcccagtacctaatcaagagttaccagtaaacaaacaacttaccaccacagcacaaattggtttacactggatacagtgaaagataaagaaatattaaatttttaccagtgcagtcatggaatgtatcataaatcgccgcgctcagttttcagctactcatcggtattggttgccagaattgagtgaaaccgagaacctagaaaagtttggtcctttctcgaaattccccggtcaaggtcataactatgtattatttatctccatgtctggtgaactggatgagtatggaatggtgttaaacctgtctgatgtgaaacacaccatcaaaaacgaagctaccggtcaactagatttttcttacctgaatgatgtgtggccagaatttaaacaaactctccccaccacagaaaatattgcgaaagtcatctgggaacgcttaacaccgcatttacccatccttaaggtgcagttgttggaacatccgcagatgtgggcagaatatcaaggagaaggaaaaacagcctctttaaccatcagaagtcattttagcgccgcccatcgtttagcacctaatctcagtgcagaaaaatatggtaaatgtacccgcacccacggacacaactatcatttagaagtgactgtagaaggggaaatggactcacgtacaggaatgatcgtagatgttcgcgctttaaagaaagtagttgaagatcatgttttagaattatttgatcactcctgcattaatgaagatatcccttattttgctgaatcacaaatagttcccaccacagaaaatatctctcgttacattagtgatttactgcaatctccaattcaaaaattgggagtaaaattatcccaggtgaaattatttgaaagtgatcaactgtgggtagaatacaaaggtaatggatcagaaacatttttcaatgtagctactgattttagtgcagcccatagattagcacatcctgatttgagtttagaaaaaaataaacaaatttacggtaaatgcgctcgcattaatggacacggacataattatcatttagaagtcaccgtcaaaggggaaattgatccagttacaggaatgggagttgatttaggtggtttaaatcaaatcattaaaaattctgtaattgaaccaatggatcatggtttcttaaataaagacgtttccttttttgctcaagttgtacccactgcggaaaacatcgcattttatattagtaatacattgcgatcgcctattcaacaactaggagcagaactttacaaaatcaaactcgtagaaagtcctaataactcctgtgaaatttacgctgctgacttagatcagacttctgtaaatgcagcagtcaaacaaccagaattagcagcagtttaagttaagtaggggcgaagcattagggcgataaattatcggttttttcccaagttgattttccgaatgcttcgcccgtacaggagtcaggagtcagaatatttataatatatttatactgcatcctgctcctaacttctcacttttcatcattgaaaaaaatatcgacgacgggctaacttgcgtaaataaagataaattaaccaagtcataaaacccaaacaaaaattaataaaaatttccctgaatataaacaataaaatctcagtatcaaaaattattattagtggtaaaggactaacttttctcaccaaaataaaaacgccaaaaatagcattaccacccaaaatcaacatcagcaaaattaaacttctttgccaaaaacgctgcttagaagtattaccagaaattaaagtaataggacgtttaccttgagattttcgccaaaattgttctagtcgccaaaacaaccataacaaaaaaggaaataaacaataaccaagaaaactaatgggagggggataaacccaacttctagataaaatatttaccaaagcatgaaataaaaccgaatttaaccaagcagtaaaaattgaacttctagctttatttaaacgtctgctagaaaaaatatattttcctaacgcatacccccaaggagcaacaaacatacaatgtacaggagtgctaataattcgttctaaaattggtgcagtaccatgaaaccaataaacccaattttcctcagcagtaaaccccaaagcagcagctatcgtaaacagaaaaaccgtactagtgcgtaacctataactgcgttgaaaataacatataggaataataacagcagcaaacttacaaccttcttcaactggactaataaccaccaactgccgcagggcaaaaccaacaaaataacgttgtatttttgcccagttcataacagaattagcagcaatttctattccccattctattcccagtgcaacaaaaccagatattgcaccaactacaaaaaaacataatagttgtaggggaaaaggaggggcagaaattcgccgatagtaaaaccacaaaaatagtaatggcggaattactgcccacattaataaaaataaattactcacttacctgagtaattacagtgcgatgacgaggactattgctagtgatactgggagttttaaacccagcctcaactaaagcttgctcaatatctaaagtgaaatattcatctaaataaggttctgtacttttgagcaatgtgaaaacataagtaggcatttttttataaatttctgatttgggattcatatccataattgttaaatgcccacctggacgcaaaacccgtcttgcttctgcaaaaatctttctagttgctgactggggcaattcatgacacattaaaaaaatcgaaactaaatcaatagaattatcagctaatcctgtagattcagcttgagcatgaacccagttaatattactttgacgttgttgagaacgatagttagcaacagctaaaaaatagggagataaatctaaacctgtgattttggcttgggggtaaagttcttgtagagcaaaggtacttaatcccacagcacaacccaagtctaaaatatcttgtggtggatggggaagttgagctttgagaatattgtgataactttgacgcagttgagtatcaccttcagcacctgcatctttccaaatgctggcatgaacagtacgagcagccacttccaactcaaaagcagccttccagctaagatcccctccatcataagcgtgaaatggacgcaagtaatattctggataggtaacttgaggattttgcacttgagctaaatcatttgcccaatctcgtgctgcttgtagtttttcaacttcttgattccaaggtacacctattttctcagcccgtttaatcatcatttgtctggcttggtgtttagctaggttaaataaaggcttaactgaaaggatgccattgactaagcgggaaggtagatcaggagacgttttgatagcagtagtcatacattttcgtagctgggaacagctttattttacagcaggtgactggtgactggtgactggtgactggtgattggggactggtgactgggaaaaaatatttaccttatcttgttcccagtttccaactgggaatgtgatcaagaggctctgcctctggtgtgactcagtgtggctgaaggcagatccttctaaaattcattcccatacagagtaagctgttacacagctaaattgtataatcctaatattctgaactcttgtggaacaggcatcttgcctgttccacttatacaaattaaatgcacaacagcttatgggaacgagaaaacgagaaacagagtatgggaacgagaaaaattttcttgcccagtcaccagtcaccaatcacttgtcaccgctactgcgttttaacgctaacaacatttccatttgagcagtagatttattgggactatgaacagtgacacccaaaccacgaatagaacccacgatagcactgatatcagggggtaggggttgacctgcggtagcaaaacgagtaattacagaggtggtgttatccatatctagatagaaataaccaccgttgggtttgggtaaagaaccagttacggttttaaaggtgtcgctattattcagggtttgacctttgttatctgctattgtttccccaataggtccaccaagagctacaaatacggtatcctgatctaaccaaccatgtgatactaaagcgccttgaaagggaatttgccattctgtgatatttttaccagcaatatttctttgaactaccttgaatgattgctttttggcgaggtcatctagtttggtgaaagtggtttccgctgttttgcgatcgctcgtatcaaataccatccctcccccaaaaccaacatttgctaacccaccttgactagatttaaccgcaccaaaagcaaattccccatccatccaactaaaaatatctttgtctaaatcaatattgacaaattgtttgagttgtccgcgagtctgttcaactgcttgcttaaattcaggataatcttttgattgttctaagaaagtttgccaactacgatttatattctgcccagtgactagagcaatggtgtcactaggaaattgtcctactattttagctggagtgctttgatattgaaatttactcagttggggatctaagttaacaaccgcttttaaccgcagtccagcatcatcaacaccaacaccagctactagggattttacttgctggagttgtgccaaagtttgcgtctgcaatggtctaccttgagtattgaaagctgctaattgttgtgccatgttggcgtaatctggcacataaatttgagccaggctgttttcaacatctacgcctttagctaaaatgctacttgctccttctttactcgcaaaagaaggttctcctttataagtgtcaatcgctttttctaccgtttgtttttcaggtgctaacaatatatgagtattgtttagtacagtgaaataagttgatttacctggatttttactgccaataattttctgacctttgtagtcagattcttcaacttgttgtgtgtttttttgctcttttaatttgttagcaaaattcaaagcattgagtttatctttgatacccactactaacagaatatttgactcttgctggacagatggagttgactgattaggtgtagtaggtgtgggtggcagtacagcaatcatcacaccaccgatccagggtttaatgtctgtttcgtaagaaatattactatcatttaatatttcttcattgatatcctgtagaatttttgctaatatttcttgcgcttgtggagtgccaaattgctgtaacttatcccaagattggggatcagtgttaacatatgttgccatcaaggcattagcaggtactactttagcactgcttatggggctggaagtatcacccaagggtgctttcaaatatacgtaagcagctatacctcccacaacaactatagccgtgctaatagcgggaactagaaattttgatttgctttcaggcattgttattgtcctttgttgcgtaaagtaggaaaagtatgattcagatgctatagatacaaaattaatcgtgattaatcgtggggttttgggacttttcagcgattttgactaatttagcggaacttactgagacgattggtatttacatacaaaaatagttttgtcgttgctctcaaaaagacttcaatggagtctagagtaaatccgtaaatgctatcttaatttgatatgcaaaaagtagtcagattctgaatgacaagttattctaagctataagaataattgttagtatttgtaatcgatggaaagccatcactgtgtgatgctagaaactcttgtcccggtgatgcaaacctgcagaatctcagatcagatcaagacttggacactgggtagcaaaatgagacaattgatttaattgattacatcccaaagaaaatcctgatcaaattaccattttgatttgggagaggcatctacagatcgctattgttatgacagtttcaggattacaaggtcagtaataaacaatgttgcaattttattttgatacagagaaagcaagacacaaatcttttgaattgccgggggctaaaccacattataatcccgataaaccgggacaggtagagcatatttttctgaacctcagtttggatattcccaaccaaagttaccatggtaactgtagcattcgcctattaccaatccgtaataatactgataggttgaccttggacgctgtaaatttaaatatccaatctgtacaggttgacgaggttgaacaaaagtttgactatgacggggaaaaactgtgtattcaattatctcaacctacgcaaattggtaagaggttgttgatagcgatcgcctactctgtggaaaaaccccaacgcggtatctactttattcaaccagataaacactacccccacaaacctacccaagtctggacacaaggagaagacgaagattctcgttattggtttccctgttttgactatccaggacagttatcaacttcagaaattcgggtgcgtgttcctaaacccctaatcgctgtttctaatggtgaattaattgataccgtagatgatggtgattataaaatctatcattggtcacaacaacaaatacatcctacctatttaatgactttagctgtaagtgattttgcggaaatcaaggatgaatggcaaggtaaacctgttacatattacgtagaaaaagctagggaagcagacgctaaccgcagcatgggtaaaacacccagaatgattgagtttttaagcgaaaagtatggttatctttatccttatcccaaatatgctcaagtttgcgtggatgacttcatttttggggggatggaaaatacctctaccactttgttaacagatcgctgtttgttggatgaaagagcattattagacaaccgcaacaccgaaagtttagtagtgcatgaattagcacatcaatggtttggtgatttactggtaattaaacattggtcccatgcttggattaaggaaggaatggcttcctattctgaggtaatgtggactgaacatgaatatggtgcggatgatgctgcttattatcgcttgtcggaagctcgcagttatttaagtgaagatagtagtcgctaccgtcggccaatggtaactcatgtttaccgtgaagcgattgaactttacgatcgccatatttatgaaaaaggttcttgtgtttatcacatgatccgtgcagaattgggagaagaattattctggaaagctatccaaacttttgttgttgatcatgctcatcaaactgtagaaaccatagatttattaagatcaattgaaaaagcaacaggtagaaatttagctttcttatttgatcaatatgtttatcgtggtggacatcctgattttaaagttgcttattcttgggatggggatagtaacttagcaaaagtaacagttacccaaacccaagctagtgatgatcaggatttatttgatctgaaaattcccattggttttggttataaacagcaaaatactgatttaaagatttttaatgtccgcattaatgaacgggaacaaagtttttatttcccattaacagaaaagcccgattttgttagttttgatgtgggtaataattatctcaaaaccgtagttttagaatatcccataccagagttaaaagcacagttggaatttgatccaaatcctatttctcggatttatgcagcagaagcattagcgaaaaaaggcggtttggaagttgtcaaagctttatccgcagctttgaaaaatgatcctttttggggtgtgcgggtagaagttgctaaacaattaacggaaattaaattagatcaagtttttgatggtttagtttctgggttgcatgatgataatccttttgtccgtcgttctgtggtagagtccttatctcaaatcaaaactcatgctagttataaaaatgtcaaagaattggtacagcatggggacaaaagctattatgtagaagctgctgcttgtcggagtttgggaacaattgctgctgctaatttagatgataaaccccacgaagaaaaagtgattaaactactcaaatctgttttagaagaaagagcaggttggaatgaagtagttagaagtggtgctattggtggtttagcagaatttaaaacttcggaaaatgctttaaatgtcttgttggaatacactaaattaggcgtttctcaagcattacgtttatctgcgattcgcgctttggggaaaatttccgtaggtcaaagtccagctaatatagaaagaattttagaccgattagcagaaatagcgaaagagacattctttttaactcaagtagcggtggtgacagctttaggacaaatggaaactcccaaagcgattgggattttacaaagtttagctgatcaaactcctgatggtagggtgcgacgttatgctgaggaagaaattcctaaagtacaaagaaatattgggactgaaaaaagtttgaaacaaatgcgggaagaattggatcaattgaaaaaacaaaatcaggagttaaagagtcggttagaaaatttggaggccaagtccaagcagggaaattaggaggataatacacattattagtaggggtttagcactgctaaaccctgacaggattcagaagtaaaaatgtctttttttgtatgtttgaattttgagcgatcgcttatgtgatgaaatcattccatataatccttaaagtcttcgagaggttcgttaaaatctgatgatatccacacttttcctttagcactacctcttttcaaaggtcgttgaattggggaaatttctgccactggtttatcatcttgtgtaataataattttttctcctttaatcaccaagtcgagatatttagtcaaattagactgtaattgatctatttctagtttagtcacgattagtaattttctgacaagaagtgttgaataataaatctgaatattatctctattctatatgaatcagaggaagtgggataaggcaaaatcaaaagtggtgaaaaagctagaattatccctactttccccctgttttgcgtaagtcctgtattcctaaaacttcctcaatctaagtattaaaccaagacaaaaatgtatttttttttgcataaaattagtataattactgtttgtacttatactgaaattgatgcaatatataatcaaggctaaatcaaaaaccaaagaaagataaatcactattgaatgctaatacatatcctgaatcatatttgccgagttagacactgaacttttaacttatctagatgtagataattttatactgcggtaaaagttttgataaatcaacctttaccgaaaataggctacagcagctttttgatcacaaaaaatagaggtttgatacatgatagaagtaccagcaaatttattttatgtggcgatcgccatagtttttatactaggattcatttgggaaataattacagtaataaaatattgtcaagaatctaattttattaagaagataatcaaagaattagaaagagatacttatgttgaaagaaaatggattaacgagcatttagaaacagaaaataattatcatagaaatcctctaaaaaccaatgataaatacatcctcaaacaatatccagatatattccatcaatcgacacgcagtaatttaagatttattagtacaatttgtacatccattggagtcttaggaacattttatggtattcaatcaggaatagcagatattccattgggtagcttaaataaaacagatgctttacaaacagatgctttaatgaaaggagtaggaacattattagcaggaatgcaaacagcattttctacttcattagtggggttaggactaggaagtgtatttactattattctatttttcacagacttcattagacaatcacgacatgacaacctaagacaaaaattacataaaattaccgttcctaaaaaagataatcgagaagatgcaatcaacagtttaaaagaaattgctgccagttttagaaactttgattttaacgccagtttaaaagcaacccaagcattacaaaaagtagcggaaaaactggactcagaaactattggaatagaagtaggaaaagctgttagtagtcaattagatagaacaatagaaactagattaacccccgcatttaatcatattgccgattcccaaaaaaccctaacccaaattaccaccattcaaaaaaatgtactggaaaacttaattagtgaaatgaaaaatcaactaattattccagtagtagaaagactagatcaaagtgcgatattaactcaacaagcatcagcagcagtcacaaaattaaacaatgaattagggggaatatctgaaaaattagctaattcaatcgtcacaattcaacaatttcaacaagaaacattaggagagttaaataattttgccaatagcttacaatctaccttacatgatttccaaacagagacaaccaacgttttacaagaaactggagttgctattactaaagcagtagaaacaagtattacaggaatggaatctcaacgggaagcattccaaaaaagtgcagaacaagcagcggatacatttaaaggaattagaagagaattagaacaatctttaacaactcaatctgaacaacaaaatcaaatgttaacaagggtttattctgcattttcacaaattatcactgaaaccaatgaaagttttaaaactcaaactataactttagaaacagtaggtagacaagcatcactattaatgaacagtgcaaaggagaatttagaacaaacattatcaaatattgatcagacattacaacaaacccgcgtcacagtacaagaagaattacaaaggtttagaattgaatatcaaaacagtttaaatcaattctttaatgatcaaaatcaactcctagaaagtacattaggaacacaaagaaatgctttacaggaagtagtgaatgatttacgcaaagctttccaagaagaaaccgaacgcagaaaatcattaatgaatgatttaactcatacaataaatgaagttaccagaggtatgaatgatattagcacagcaactaataatatgcacagcaaaatacaagtaatacaagaatttacagcagcaacgggtttacattcaggagaaagaataactcaactccaagaattatctcggaatattggtacagtaagtcaagattttaataatcttctatataattggcgagatcatctcgatcaatatctagataaatcaacaaaatggcaaactgaattttttaaagaagctgacagttccatgtcaagattatgtagtaacattttagaaaatgcaaataacgcattagtcaaaattgaaaatgaacgtcgattaaattaacgtaggttgggttgaacgatgtgaaacccaacacaccttttcaaatcaaatgtttggtttatttgcatcaattcaacctacacttttgaaatattagctttacttgttgggtttccttacgtcaacccaacctacagaaaataattatcaggtaaattatctcatgttcaatcatttaaacattttcaaaaatcaagatgatcaagaagaagatcccgcaatttatctttctatcggcgatttaatgtcatcgttattaatgttttttgcactactttttatttctgcattaattcagcttaatcaagcacaaaaagacattaccagaattttaataggtgagttagaaggacaattaaaagctaataatattgaagcaaaagttgatccaaataccggagatatcagtttaagagatagcatcttatttgaaactaatagcgcaaaattaaatccccaaggtgaaaaaacactgcaaaaattgattcccatttatagcaaagtaatttttgaaactcccagagtgaaagatcaaattgaaagagtagttattgaaggccatacaagtgcttatggtaaagctgatttcaacatggaattaagtttaaacagagcttggcaagttgccaaatatacattatatacaatgccatttcctaacaaaactcataaatcacaattagagaagaaaatcatggtagtaggaagaggtgaaaatgatgcaaaaataggagatttaccaacagatagaagagtagtatttcggattcagtttaaaggacaagatttgagtaagttaaatcaagcagataattagaaaacaatgcttcacaaagacttcaaccttaaagaatttagtataccagatcatcaaccccatagattaattgaactcgctgcaaaacaaaaacctagtaatattaatttatctatatcagcattgcaagaaaaaattgatcagaatagaattaaagatattagtttaatagaatggatatggtgtattgataacgatcaaatttgggaagcaataccagaagaagaaagaaaacaattaactttaagaatttggcgtatatcccaagaaaataaatggttatattttaccttaattcgtcggttagcttggttttatcatggacaaaaaaatgtaatcacatcgcacttagttaatgggtttcttctgtggagtaattcaatttctgtcaaggataatctagttattaaaattttggttgctttgggagcaaatgaaccgaaaaaagcaatggtaaaaattatttgtgaccaaaacttaactcataatgaactattaccaaaaatcaatcatgttctcccgaatcttaccatatttaaagattatgttttggaaatagcaccttattttacaaaacagctacatccagttacgttagataaagttaattggttattacgttgttttgaacaaatggaggaaactgatcaaattaaatctgtagaatatattttaaatcatctttctacctcaatagttggtaggtatccagagttagttaattggttaaaaaccaactatcataattctagcaaacaatcaaaattatccagtcaagctagacagaagttaagaatttggattggtgcagttaattatcaagacttttctaatttagtagatttaattgctcaacgaattggtatcacagacaaagaggaaaaccagttaaacaaacgtcaaggattttgggctaattatagcaatagttttatgagaattaaaattttattacctatgcaatcttatgaaattatcaatcatgatttgagagcagatcaagatgttcaaagactacgatcagatggtagtgatgagacagaaatatgtatttttgatttaggagagaatggttttattgtcgaattttttagaggtagaggaagtgaaactagaatttttcctcaaaatgattatatcgaaagtgttttatttggttctcaaccattatccgtgaaaagaattagaaaattaggaggggaagcacatgatcatgctttagcttggcaatggtcttgcgaacaattattaagaactaaatatcaaattctgccaaatacaggaactacatcttttatcggattaccaccaaaatatggtagatatgatactagtttaggtttacctaatcctgatgatcaaaaattaaatgaacgtcaaaatcaattacaaaaatggaatcggatcattaatcaattagaattagaagccaaacgatcatcatattaatcagatttcaatcaaaatctatcgaaaactgttagttctctgtatctttgtgctttaaatatccattaattaaataaacattcagtaaataaccatgaaagatatatttcaacaaccatcaatagaaacattagtaaaagaaattgtcgccttaaatcatgcttggaaagcagcaggagaaatatttggagaagaaagcgaaatagctaaaagtgcaagagatttaaaaggatctttacaaacaagattattacgtacctatccaaatcaagtttatttgagaatagatcaaaaaagttcacaagaagcaggagaagaagtatatagtttgcgtttagtaaatccaattaataaccgtgataatgcagaacatttacctgttagagttgtcaaaaaattactttcccaggaagaaattaatcaattggaaaaatttaataattagggaatcggataatatttatatattaatctatttcggatagtttcaactgcactatattaataaatatcaaaattctctaaacagcaatatatctcatctttatatacataaaaaccctgtatgagattttcaccaccatcctacaaaacctgaatattcacaaataaccatcaactaacctgtatgggatcggattttcaagatatttaatgtcagatttgatactaaattataccgtatcaaacattaagaaataataaaatactctcgctaagagacaaaagtttgtacttttataaagtataattaagaaaaacataaactaatctcaacattcaagataagttgagtttatctatagcttccatcaaaaaccaacaatacacttgagcaacaagtaaattgtcaatcaagtagtcagaaaattctcaaattcccagttgtagaggcaaaaaaagacgtgggtcagtatcaacctgctcaactaaagcagtataatccagaagcgatcgctcgttactatcgttaccgtccctggttagcttggggcagactactgagaatcatcttctcctttgcaggctttctactcagcctcaaatgggatgaatggcaaaaccaagttgagcagaataagggtaaacgagctacccagttgcgacaactgctcacaaacctcggaccgacatttattaaagtgggtcaagccctttcgactcgaccagacttgatccgtaaagactttttagaggaactggtaaaactacaagaccagttaccaccctttgaccatgacctagcgcaacacattattgaaactgaactcaaccgttccattgatgagatatttagcgaactttccccgaaaccagtggctgcggctagtttaggtcaagtttaccggggtcgtctcatcactggtgaggaagtagcagtcaaggtacaacgcccgcacctgcgtccagtaattacaaaagacttatatctaatgcgttgggcagcaacttggctgagtccttggttgcccctcaatctcggccatgacctcacattaatcgtcgacgagtttggcacgaagttatttgaagaaatagactacatgaacgaaggtcggaacgcggaaaaattcgccaccaacttccgtgatgacccccaagtaaaagtaccaactatttactggcgttatagtagtaaccgtgttttaaccctagaatggattaacggctttaaactcacagatatccaaagcattcgccaagcaggtttagatcccgaaaccattatccagattggtgttacttctggtttgcaacaactattagaacatggttttttccatgctgacccccatcctggtaatttatttgctgttcccgatggtcgcatggcttacatcgactttggcatgatggaccagttggaggaaaccacaaaggaaaccttagtagatgccttagtacatcttgtcaacaaagattatactgacttagcggaagactttgtaaaattgggcttcctcgctccaaaaacaaatattgctcccattgttccagcattagaagcagttctgggaaatgccattggtaaaaacgtcggtgattttaactttaaaaccattaccgatgaattttcggaattgatgtatgaatatcctttccgagttcccgctaagtttgccttaattattcgttctttggtgacacaggaaggtattgctttaaccctcaaccccaattttaaaattgtggaagtaggttatccctacatagcacgacggttattaactggtgaatctcccgcattaagacgacgcttattgaacgtgctatttaaagatggtaaattccaatggcagcgtttagagaatttgatttccattgcgcggactgatcagcaatttgatgttgttccaacagctagaatgggtttacagtatttactatcggaagaaggtaaatttttacgtcgtcagttagttttagcactaactgaagatgatcgtttacacactgatgaagtacaaagattgtgggatttagtcaaagatgacttaccgccaaatcggttattaaatgtagctgtaggcattttaaccgagttatcgagagaaagtgtagcagctattttgccaaaagcaacatctctaatttcgtttactgaaaaacagtaacaacgtttaaattatttgcataaaaatcaggagtcttcatgtattattatcctctgcaacctccttatatcttgcttttggttggtttcctcatggctttaacttctggttttgctttgtcaggaacattaaaagtaattgtccaaaaatggccaaataacaatcaagaacctattaaatctagtgcttctttaaagcaattgttagtaccatttattggtattacgggaggcgtttgtttatttatgtcttctggtttagaaatatttggttttccctctcccctagctttgggtattggtttacctttgagtttgggaacttgtgtgtttgtttggtttcagttaggtagtttgctggaatttgtcagcagtcgaggaatgcaatctttagatttggattcttggtcttaataacaataattcagaagtcaggagttatttattttggattttggattttggattttggattgttttgtcaaatctaatctaaaatctaaaattttcttccccatctccctatttcctttactaacgaaaaactttttgctgccacttttatcaagtctaattacttgtgcatttgcctgaacttgaaaatctgctttttcacgaactttaacacgaattttaattaattaggtttttaatctgttcatattctcttgtctcattagcaattaacttgactaacctgattcaattcaaaacttctaaataggctatagttatgaatgatcaatatcaagcatccatgtgtgtgggaggtaaagaaagcaatgcaggtaatccgactatcagcactttctgacaactatatatttatgctgtacgatttacagcataatattgctgctgttgttgatccagcggagtctaaaccagttttacagcaacttgcacaactaaaatgcaatttagtagcaatttttaacacacaccatcatcatgatcatgtgggtgctaatctggagttaatcgaaaaattcccccaattgacggtatatgctggaattgaggatcgaggaaggattcctggacaacaggtatttttacaagaaggcgatcgcgtacaatttgccgatcgcacagcagaagtattttttgtacccggccatacccgcgctcatatagcttactactttcctcctgtaacacctggtgagacaggagaattattctgcggtgatactttatttgctggtggttgtggtcgtttgtttgaaggtacaccagcgcaaatggtagactctttaagcaaactgcgggctttacctgataatacccttgtttggtgcgcccatgaatacactttaagtaatctgcgctttgcattaacagttgatagtgaaaacacggatttacaaaagcgatttgcagaagtaacagatatgcgtcagcgtcaggaagctactgttccttctctgcttggtattgaaaagaatacaaatccgtttttacgctgggatcatccttcgttacaattagctgtaaatagtaaagatcctgtacaaacttttgctaaaattcgcggaatgaaagataaattttaagtaagtattcagcagtcagctatcagctttaaagactgaaatagaaaacaagagaaaaatcaggagtgtataaattttatgcaattaagaattataaatctttcctcttgctgttattagctgattactgattactgattacttacactttattcacaggtttactcaatgtttaaaaagcatcactaaaccttctcaaatactcctttctccatagagaatccctttttctgtttgtcctaatttccaaaacccgtattccctgacttggtaacagttttaatctttcttctaactgcttccaagaatttattaactcatattctacaccataagtagcacataactgggcaaaattaatatcctggggagtggcaaaaaattcttcaaaaggtggatcaaaattagcaataggtaacatttcaaaaattcccccaccattgttattaattaatacaattgtcaaatgtccaactaacttatttctcattaaaaaaccattagtatcatgtaatagggctaaatctcccgttaacatcacactactttgttgatgatgtgctattcctaaagcagtggaaagagtaccatcaatcccatttgcacccctattaaaatatgattttattcctgaattatttggtttccagaaaaattccacatctcgcactggcatactattagcaataaaaaatggtgtttgtgggggtataatttgcgaaattaaccaagcagctttactttcaattaagtcttctatattttcaaaagtctcatcaatattttttctaatttgcgcttcaatttcacaccatttttgtaaataaaacccccatttcccatttcccatttcccatttcccattccccaatttttctacagatatccttaaatgtgttgtttttccatgtaaaggatctaaattttcagcactactatcaattaaccagcgttgaggattaacattaattaaccaattacgtaattctttactagtcggcatttccccaatttgaattaccatttctggtgttaattcttgggacaagttttgattacgtaaaattatgtcgtaggtagaaattagataggggtttaaatctgcgtaatttctaacaggagaaagtccctcagctaaaacaggccattgcaaagtttgagaaagtcgagcgatcgctatacaatattcttcaggttctttgggttgtgcaactccagcaataataataccccgttgacattgttgccattctttaggtaattgataattggtaattggtaatggtgttgcaattatcccagaaaagaactcttcacaatctaatataaaatcagtaccatcagaaattggtgctagaggatcacgaaaaggtatatttaaatgtacaattccccctgtaggaaattggcaactttcccaagcatgaattaccgtttgtcgcaaataacttaacattcttttattagcgacaggtgtagctaactcagtttgccagttaggataattactgtataattttacctgatcaatagtttgtccagaatggcaatctcgcaattcagcaggtctatctgtagttaatattaataaaggtacacgactttctttagcttcgattaccgcagggtaaaaattagctcctgctgtccctgaagtacaaaccaaaaccacaggttttcctgttgcttttgctcttcccaaagcaaaaaaagccgcagagcgttcatctaaaatgggaatagcttcaatatctggtgcttgtttgctaaaagctacagtcagaggagtagaacgagaaccaggacataaaacagcacaacttaaacccaagcgtttgagggtttctgttaaaacataagaccacagttgattaacattattaaaatgtagctgcattaattcaataggggatataagacaatttttaattttaagttgtttatcgggctttttaatttaaaatttaaaatgtctaaaatgtaaaacttctactctaatttttatggactgtattcatttaacaggaattagctgctatggctatattgggtatttaccagaggaaaaggttttaggacaatggtttgaggtagatttgaagttatggttggatctttcccaagctactgagaatgacactattgaagatactgtagattatcgcactgttattaatttagtgcagaatttagttaaaacatctaaatttgatttgttggagaggttagcaggtgcgatcgcagatgctattcttcagcagaatgatatggtttctcaaatacaagttattgttatcaaacctgctgcacccatacccgactttaacggcaaaattagcattgaaattaccagaactaggtaaaaagataaatagataaataaaaactggagtttaaaaaacccagataaaacaaaaccccctctaaataaatagaggaggcttttgttgttaaatattaaacctggcatcgagctattgtgacagagggcaacccctcaactatcgtcgccgcagcagcgtttcacctctgagttcgggaagggatcagtgtggttccaccgcgccatagacaccaggaaaacccgttgggaattgataattgacaattgataattgaaaattaaagaattatcaaaaatcg

SEQ ID NO: 69 - DNA, 29523 bp, Sphaerospermopsis sp. LEGE 00249
  LEGE00249_85
ggggaagggggcagggggaaatatttgtattttcccaatcacagatcaccaatcaccaatcaccagtccccagtcacctattctctgaatatatgttgcaaaaaagtaagaattgggtcaacaaatgtcaagcaatgcaaaggatcttaaaggaaagtcaacgaaataaactttatccacaagaaagtgttagtttaaatatataacctcaatggtgatgggaggaattacctgcaataagcatcacgccaaaacaaaagaaatggaatggctgatggtatcttcagaagttgttgacatcgatcagaatcaaaacttctattctggctggcataattaatatatagaaagagcaagccaacagaagaatcacaagaggagctacttctagaattgtaaataaaagttgctcaaactgaaaaagcaggtacagaacagctaataatgattgattgaaagtttttctttgcagatccagttgtctggcaagcagttggatactaacacagagtttcacaaactaaatcaaagctagaggtacttatagttaagatgcgacaacttgagaaacaaatacaaagccttacattaaaagcagttcacaatttgtattggcggcagtgatagaccttaccgcaatctctgtgcatacaaaacccattcacatcaaataaatatttagctaaatatttagcgggagagtttacatgaagcttgtcatccacggcaaaaatattgaaattaccgatgcaattcgagaatatgtgcatcaaaaacttgaaaaagcagttagtcactttcaaaacatcacgaatgaagtagatgtccatttaagtgtagctcgcaatccgcgaattaatactagacaagcggctgaagtcactatttatgctaatggtaacgtcatccgtgcagaggaaagcagcgagaacttatatgcaagtattgacttggtggcagataaaatatcccgtcaactgcgaaaatacaaagaaagaagacaagaacacaaaacccagcctataccaactaatgaagccgtagttgccgaaccagtagcagatttaatcggcgatcgcactcctgaactaccaggagaagtagtcaggactaagtatttttccatgcctccgatgacagttgtagaagcgcaagaacaactgcaacttgtaggacatgacttttatatgttccgtaacgccgaaacaggagaaatcaacgttatttatgaacgtaaccacggcggttatggtgtgattcaaccacgcaaccctaacactaacggacaaactaacggcaagaacggcaaaactgcccaaggtaatattcccatgccggaaaagtctaaagtctaatttcaggtgattgggtactggggacacttcgacaagctcagtgcatcgctggggactggtgattggggactgggacaagattttagattttagattttagattttagattggagtacatgaaatacaatccaaaatccaaactccaaaatccaaactccaaaattgtatcaccaatcaccaaatcatcttgcagccaactgttgtaaccttttcaaggtttcctcaacgtgacctttaaagttaaacatggaatcaaacacagatttaacaatgccgttttggtctattacgtaagttacccggccggggataaaaccaaaagcagtagttgcaccatattgttttctaacattgtcgcctttatcactcaacagtgtaaaaggtaaattgtacttagctgcaaacttctgatgagattcgctagagtcaccacttacgccgatgacttcagcaccagcagctttaaatacttcatattgatctcggaaagcacaagattccgcagtacatccaggggtgtcgtctttaggataaaagtaaaggacgacagcctttttgccgcgaaaatcctttaaactgacggtagaaccgtcttgagagggtagactaaaatcaggtgcagtatctccaatgttgatagacatggtggctattaataatggcttaacaaatctacattaactaattatttgtcatttggtattctcaacattagttatatttcatcaaaaagttctagttctagttgatttggccaataaggtctttttatgggtaaaagaggatcgcctatcaagccagaaagtttgagcaatccatcatcaaaagtgtctaaaacatccactttagcctgtatagcagtggctacatgagtagcatctttgggttttaaactttcatattgccacattaaatctctggctaattctccaatttttctatctacatcatacacataaatccattcatgtctgaaaaaagaacgtattttttcctcaacatccttagaaagtttaggtttacctttctccaacctaataacttctataaatgttaatgcagaggtaacaatgataatttcgccagcttcagcagctttgatgactgaaaagcattcattgattttatcactttcatttttaagcacagctaaaaacccacattccgcagataaaatccaattctgaataattatcacgaaagattcagggttgtacaaactttactccaaaaatattctcaataaatgagataaattcctaataaacattttatagttcttttgaactaaaatcctgaaaacccttaccaaacaatgtttttggagataattatttttttactctccgcttatgcggaatgtgagtaaaaaagtacatgaatcccagtaatgacgaggcttggatgactttttcaatcttcgcctcctaaaataccaataatatctttaatgcggggaagctctatctcacttggaaaaacttccatttcttcaacttctacactaactttttgtccatcttccctagaacggatcagaccatacacagatactcttttgccaagagcatcctttacagagtcaatattttctggcatgaaatggcattttacacctttgccaataagtagatcataaattctgaataaaggctttcggcttaaatctatagctttaagaacaccttctacagaaccaaaacttttataatgagcgcctataagttcatcaacattggcaactaaatgttgtgtaagattaactttttttgaattagctcctacctgaatagttaacatatcttcgccaattaaaccagctaaacacctagcactttctaatgctcgatctgaaaagaaaggtggccgtttaggatattcctcaagagtagcaattcctgtttctactgtagtaacaacttcagctattgccgccatcgctacacgatcagtcgttataccctctattgttaggtgaacactaccactggtgacagatgaaacaacccaatttacagatggacgttttttttcactcagactctgatccacttcatgtaatatatttgctaattcttcttgggctttgcggaatttgtcaaacggaagcaacgagccatcaatgtcaactgttaggctcgtatggagttttccagattgaactagctgcggtggtttcatttttgaggcaaagtgattcaatttctagtttaaactaaatttgtacttgacaatcgttaatatacgcacacaatctataggactcctatttgatttttgaacaagctgtaaaccctaaaccctatattatcaacgattgattctcagtatattgagcaagattcaagtaggattcctatatgtcttctaggcaaattaagtaatttcaggttttttgtattgagcaaatgccttgtatggtgatttattaacaaaattttaccttctaaccaagtttatacattttttttcttgataacgtgcatcaagcagggtagtttaatattcatcaaaaaaaactatttcgcttatgcgcctgacttcactggatgtatttcgtggtattactattgcgggtatgattcttgtcaatatggcgggagtcgcagaggctaaatatccccctttagatcatgcggactggaacggttgtacacccaccgatttagtatttcctttctttctgttcattgttggtgtagcaatgaatttctctttatcaaagtacaccgctgatcacaaacctaccaaaactgtttacttacgtattctgcgccgcgctgctattctctttgtattaggattaatacttaacggcttttggaataaaggtgtttggacttttgactttagtagtctccgcttgatgggggtattgcaaagaataggtttaacttacctttttgcatctttgatagttttaaaattaccccgcaaaagtcaatggatattagcaggaatattacttagggtttgctgaataaacctaaaaccttgatatatcaaaggttagaggctgataaacacagaaattagtgcaagggttttgaagggtataccggaaaaagtgtgcattttttgggatttcaagagatggcaaagaaattttccaatctcctcctgactcctgactcctatgccctcacggaaagactttctcagcaacccctacttattggttattggataacaatgatgtatgtccctgttcccggttatggtgcgggagtgctgacgcgggaaggtaattttggcgcatttattgacagattaattattcccaaaccacatttatataaaggtgatgggtttaatttcatgggaaatccagaaggattatatagtacaattccagcaatagttagcgttttagtcggttattttgcaggagactggattaaaaataaaaaacaggctaattcacaaactagcatggatttagttttatttggtttgtgttgtttagtaattggaattatttgggatgtagcatttcccattaacaagaaactctggacaagttcctatgttttgtttaccagcggttgggggttaatgttattagcgggttgttatgaattgatagaagtgagagggataaaacgctggagtaaaccttttgaggtgatgggattaaatgcgatcgctatttttatcgcctcagttttgttaatcaaagtcacagtaagaattcaaattggtactggtgaaaatgccattagtatctacaattggatttatcaaaatatcttggcatcgtgggcgggaaatgccaacggttcatttttatttgcactttttaccctgttgttttggtatggtgtggcggttttaatgtatcagaaacgctggtttattaaagtgtaaataatgtaattaaaacctttgtgggacaggcaagatgcctgtccaatattttgttagatattgtttccaaataattacgaaaatagtaaaaatgagtccgcatttgcggacatttactcaacaaaatcctgacatcaactacaccccaacctccgcagcttccaaagcattcacttcatcaaccactcgccaaatttcctgcatcaactcatctaaaccagtgcgagttacagccgaaataataaaaaccggagctaaagaaagatgatttaattgtgtagctaaagcctctaaatcaacacttgccctatcaaccgcatcaattttatttaacgccaaaatttgcggacgtttagccaaaccccttccgtaagctttgagttcttcttgaatagtatggaaatcaccaattacatcttcacttgtagcatcaattaagtgtaataaaaccctagtcctttcaatgtgccgcaaaaaatcatgacccaaaccagcaccatgagaagcaccttcaattaaaccaggaatatctgcaaaaacagtaccatcacctgtgggttttttcactactcccaaattaggaacaagagttgtaaaaggataatcagcgattttcggacgtgcagcagacaaagaagaaattaaagttgatttaccagcatttggtaaaccaataattcccacttctgctaacagtttcaactccaaacgtaaaaatttatgttcaccttctaaaccaggaagggcatattctggggcgcggttacggttacttaaaaaatgttgatttcctaaaccacctttgccaccttcagcagccagaaaacgttgtccaggttcaactaaatcacataacaaagcgtccgtttccccatcataaatggcagtaccacagggaacttcaataattaaatctttgccgtttgcacctgtacaattattaggaccaccacgaccaccattatcggctttaaatatatgtttatatctaaagtctaataaggtttgtaagttggtatcagccacaaaaatcactgaaccaccttttcctccgttaccaccagaaggaccacctgctggtacatatttttctctgcgaaaagcgacgataccatcgccacctttaccggcttgaacttcaattactgcttgatcgataaattgcataatttaattattgggcattgggcattgggcattgggcattgggcattgggcattgggcattgggcattgggcattgaaaattagctattagttgtcttttctgtttcctattgattttaagtaagcactaagtttaggtaacagttcctcaataattggtttgaatcggtttatttgttcattggttaataattgtctagagtatgctagtcttaacaaacttattgtttaatataaagaccctctagcaatttttacaaatcagcgattatcttggtcattatatcgccccctgccttcctcaatattggtacaaacactatcagcagcctcacaatttgcttgcctatagtatccttggcgaaatagtcccattctttaacaatataccaaatttgattagctaacttttcagctaatttgtaaacctctaaattttcaaaatctggtctattcattaaatacaagacttatgcacctggtttatttgttaagggcgggaatagagcataaaaaatcttccatgctccatacctaatgcctaaatatactgtgaaacatcctcctgacattcatcagcaaggtaggaaagagcgcgaaagcgtaaacctactaattgttcatacaatgggttgattttgcacattgggggaatatggactatttttttaccaaatagggtgacatctctttcaaaaggacactgggaaggaatcattttacataaaaatctggccactctaggatcatgaatttctaacccgtctaaccaatcccgaagcgggtgcaatatatctggtgggtgtagggtggtttcttgtacttgtttgggatgttccaatgtgtgacgtaaagctgtgagggcttgggtgtctaattccaaagcttgacaaaacttgtgtaaaatttcttcttcgctgggagaatagattccatcagcgatcgccaccatcactgctgtccgcaaaaaattttccccaactgctgtacctttacccaacacagcagctaattcttcaggtgtaattatctctaatgaatcccagttcagacaaggggctaattcatctttggtaatgctgttaattaactcctgttcttgggcatcaaaattaccatcagcccaagcaatagttagtagtccacgtaaccaaaccgcaatttgttcgctactgtagggggtttgaaccgcacttgtcataacaactcacgcctcaagatattcaagacattgaagatattatcaatcattcatttctaaactaccccaatcgtctgttttgcgctaaaatcccttttacaaagattattgataattttttctatttactactttaaaggaggcaaaaggcaggggaagattaataatctaataatgcccaatcaccaatcaccaatcacctatgttttttttcggaattgaacatgaagttgcttttcttaaccatgaaggaaagtttgctgatttctcttgtacaaaatttgctgattttcagcaaatagttgacaaattacctctttacccccatgactacccacaattgagggttggtgatgctggtattaaaaagaagcgatggtatattgagggttttgaaagatttgctgattcagaagcagtaattgattgtgtagctaaaggcatcgaaattagaactactataaattctactattcaaggtgcaattgatgaattaacagctagtttttctttactacgtcagacagctgctagttttggtttttctcctgttttaatcagttttaatccctatacttgtgtttttgaaccccaaccaccattaaatgattttgaacttaggcaattacaagcttatccagatgaacaaactgcccatatttacatggtttcctatggtccagatttaaatatttccatagcagatttgcctatagaaaatgtaattgatattgggaaaaaactgacctattacagtccttttattgttccttttagttacagttctccgttttataatggcagtttatgggaaggtttatcagtgaggacatttatcagaactggcaaaagatcagcaacattagtgtttgtggaaaaccaggaacatttaattaaaagtgtaccttcattaacgaaaattgcccgcattcccgcagaagtaggaagaatcgaatttaaagcttgtgatagctgtgataatttttctatttatgcagggttactggcactgttaaaaggtttggctttagataaaaccttggaaggtagagctattgtacctgatacaactttacatcaaatttcagccaaagcaggatttgatcatgatgatatttttctgaatgccaccaaagttttacaagctgctgaaaatgccctaggaaatgacccagatattaaatttttagccccattaaaagatattttggcaaatcgcaaaaccaaatcccatcaactaattgaaatgtttgaaaatctaggttcaattgaagaaacaatcaagagaacttatgtttgaggtaattggtaattggtaattggtaattggtaattggataaaaacaactatcaattatcaattatcaattatcaattatcaattatcacctgctgacttggtggaatcttctgcataggaataagcacttccattacagatttaacaataggtgctgtcacagttccaccataggcatttgctccttttggttcatcgactattgccaaaactacataacggggggcttctgctgggacaataccaacaaagctagtaattcttgcaccgggaatatatccacctctaggagaggctttttgggctgtaccggttttacctgcaataccgtatcctttgatttgagaagctttaccacttccctgagaaaccacagtttccatcatgtccatgaccttttgggtagttgtaggtgagaaaatctggcgtggtgctggtagattaggtgagtagtgaattttaccttgactatcaatcaagccttgaactacatggggtgttatcaatttaccaccattagccaaagcgccgtgcatttgcaccagttgtaaaggtgtcaaagaaaaaccttgcccaaaagaagtagttgctggttctagattagaggataggaatttttcttgccttttgagactgccactgactgcaaaaggcaaatctgtatccattttttgtcctagtcccagtttttctaaccagttataatatgttctcggcttcagacgttggataatttgtaccataccaacgttgctagaagtttgtaaaatttcggcaatattaattcgtctaaaactgttaatttctgcatttttgataatgcggtcagcgactttaatagtacctgggtcattaaatacatcctctggtttgatgacaccattttccagagcgatcgccacaattaaaggtttaaaagtagaacctggttcataaagatccgcgacaggccaatttctaaacagtgaaatatctgctttggaatattgatttgcattataggtaggatgagaaaccaaggccaataatgaaccatcggtggcatccatcacaattacagcaccgcgtttagcctgaaacttgtcaatctgttctttgagtgccgtccgggctgcccgttgtaaacgattatcaatagtgagttgcagttttaaatcatcagaatgcaaaaatccttctggtgcataggttggcataattgcgccgttaccagcccgactgagacgcactgtttgcctggagcgttccaatagtgtctcttgactatattcaacccccgcctgaccctgacggtcaagattaacatagcccactacattagcaaccaaatcatcttgtgggtagaaacgggaatatttttgaataaattccaagccattcaagcggaatgaaatcaagcgatcggcaatattttcgccaataccattagcaatcagaataccgctgcttctactttcaaatgtttttactaactgacgagcatctttgttgagaattggtgcaattttttctgctatttcctccttagacttatcaaatagtttgggatgggcatacagggtatatactggacggtcaatggccaacatattgttattgcgatcaaccactgggcgacggggtataaaaggacgcacattcaccatttgctggtttcttgccttttgagtgagttttgcaccatcaataatttgcagtcgatacaaattgaaagccaaccccaacccagcagcaaccaagataccccaaactatcaacagtcgagacttgggattggttgcttgagcttgaggaaaaccattctctggtacagcttgtttgtagaacttgcgccgccttgtaaactttaaattctgcaaatttctcaattttgttcggcttggtgacttctgcattgggtttttttgtgtcagttctcagttgttagggaacagggaacagggaatagggaacagggaatagggaatagggaatagggaataggggtaatcaattagcaatcaccaatctctttaaattttaatatcctaatggagaggaagtttgggactgcacttgtgaattgggaactatacttgaggatgctgactttggactaggggatgttggtggcaaaaaaattgtctcccctggagttggtaatcttagtcctgcttctgttttttctccctcttcagccatttttttgatcagtgctgcattggttgtgttcaactgccgctcatgacgttgtaggctttgcagagtgcggtaatattgactccaaagctcttgagaatagactgtcaaaccataaaccaccagtgttgcagccacagatacaaatgtcgcagctgaggaataacgatagacagcgtgcaagcgtagcaaccatatcggtgtggatgcagcagtagacatctcatttaagtgtttatccttggactgcccattcacatttgtgctatttgtgactgttttttgtccagaatttttctccaatgttgatactactgcctcattgactagagaagttgatatttttctaggggaattacgttttcttttagagcgcactactgtggatgcactattcgatttagaatttgtttgcatattttttaacaggatactagagcctccccgaccccagggtggggtcaaatttcgcttgaaccaggcactttttgtagtaacatctgatttgcggacagcagtcatgatttttgtaaatgatagattttgtacttaaacttaatacatttaaaattatggcaatgcagagcagtcagaagcaatacctaatactcatattggttgaccgttagagattacccaaaagttgggtggaaatttctactctcaaagcatttcaaaaaaatcgacaaataagctattgtagtcaacagagcaatttttagtattgccttcattggtgaaagaggagttagttatgaaaacaaaaatctttggtttggctctcatgttaagtttggctaccactctgggagcttgtgaaggtggtggcgatcccgccggtactaccactactcccgctgctacaccagcagctggcgagcctgctgacactggtgctacccccgcttctgctacaacaacaccagaagctaccccccctgctacaacaacaccagaagctacccccgctgctactccaaactaagactggatacgataatttattgaggatagcgattctcactgcatcgcaatcacataaataatttgatcacgaatccacttagggaagaccaaaaaataaattattccatcttgtggggtaggcatcctgcctgcctttcactattagcgggctggacgacagcccgcaccaaaaaaaatgttggcatatttttttatttggaagttccttaaagcaaaagtcctctgagaatggtaaataacatgaaataacaaccttcttagcaggacaatcaaaccgaaagcggagcgactcgactatgataaaatcgaatcaaaccgcttatggttatcaattgataattgtttcggtaattgtcaattgttcattgtccatgattgcaacaattgtctttacttagaaagtagctttatgttgctactgcaattcagtacatctcactattgtcgtaaagctcgactggttttaggttacaagggtattaattatcaggtagaaaatctcactcctggcttgcacatcctcaaggtgaagccattaacaggtttaactactctgcctgttttgttgccgcaaatagagggacaaccccaagctattggcgactctacgcaagttttaaaatttttagaatcgtatcaaccagaaccttcattatttttcagtaacccggaacaacaaacagaagctttgatgctggaagactggttagatgaaagcattggtactgctacaaggtttgtatattatcattttcgggctggtgaaggtaaaaacattgatccctctttatccagtcaaatagtgattggtgtggttaggaaacaatatggtattaacaatgctagtgtagaattagctactaaaaggctgacaattgccctagaagaattatctaaacgctggcaaagcagcgaatatttagtaggcgatcatttgagtgtagctgatattgccgcagccgctttattgagtcctttagcacttattcctcaatatcgtcaaggatatccttggttgtttgaacgcattgtcaaaattcatcaattgtgtggtgaagcattaccaccaggactgtaaaaagtcaaaagtcaaaaatgagatgtatgaaattttggtttttgggtataagtaccgctatgttagtggtggttagtagccattggggaacaaaggtcatggcattaccacctgtggaggatatatcagaggagatattgcggacagagattattaccattgggcgatcgcctattgatggtaaactcttaactgctgctgaatatgcccaaatacaagcgcaactacaaaccagccccccaccaaaacttaatgctcaaatccgagaaaaaatatttctgttacagttacgcaagacattattacagcttttcccttttttagatatttaggggttgctgaataaaccaaaaagcctcataaatcaaaggtttgaggctcttcaataatggacaattaacaattaaaaattgacaatgacctctcccttaaagggcggattttttttgggttttttccccttgaaacccaccttccgcaccctaaactgtcacacaacgaagattgaccgtttggggatttgagattggctaactgcttgcagcagcgcttcgctatcgccacctaagatttagactattttgtatcaaaattatcctcaaaagtattcaaaaatccgaaattaccgattgtgacactagggggtgcggaatgtgggataaaactaggtctagacctcagtggaatcagtagggtgtctttgatagcaccgttgaaggttcgtttgtggactattcaagaatcccccggcttttagccggggggagtatcaaaactgaatcactaaccgatactgttagtaaccgggtggaaatagaaagcaaaacctaaaactgtataagcagctaaaagtaaagttccttccaaccaattagacttaccatcagaactaatgctattggcaattaaaaccgataccgctacagctaccagttcaaaaggattaaaatctaaatccattggttgacccataaaccaacctgcaataaccaaaacaggagcaacaaataacgctatttgcatacttgaacccactgcaacagataaagaaagatccattttatctttcatggccacagttacagcagtagcgtgttcagccgcattaccaacaatgggaactaaaattacccctgtaaacaaagctgttaaacctagtttagaagtagctacttccaaagagtctaccaataattctgattctaaagccaccagcagagtgcaaactaagagtacaccactccacaaccaaagattgggtttttcatggggagtttcttcagcttcttctatctctgctacacctacatcatataaataggcgtgagttttcatagaaaatagcagtgtcaagccatacactaaaattaagactacagccacagctagagacagattttgtactactttttcactaatgccaatggaagtgtagttcatagctgtgggtagcaaaattgctataaccgccaaattcatcgacgaagcatttaccctagctaccaccgattcaaaagtttgttccttgtaacgtagtccgcctaataacatagaaagacccataactagcagtaagttaccgataattgaacctgtgatactggctttaacgacttctatcagtccagcattgagggcaaccaaggctatgatcaattctgtagcattaccaaaggtagcgtttaataaccctcccagcaccggaccgacaactacagcaatttcttcggtagctgcacccatccaagcggctaggggcaaaatagctaatcctgcggtgatgaatactaccaattctccccactctaaaaagtgcgctgctagggaaatggggataaaaactaataggccaagaaaaatgatgtttttagttgacattatatgatctcgaattttggataggtataaccaagatataggatactgtcaagctttcggaaattctactgtttcaatgatttccgcagatatataaaataagatgacgatttaattcaatattgcaatattttgttgcaaaagtatgactttcaacttgggttttatcacaaaaatgggttttaatagattacaataccgttaattgtcttggctgatgagcgttgccagtgatataatccccaatatgaaattttatgccatctttgatcatttttcatctacgagggaacagttgcgcgagaatgcagatttcctgacatattgagacaatttttgccaaaattctgattcggtttgattttcaagctgttgtttaaagcggattagaccataaaacaaatgtaaaaaggtagatataacacacactttcgccacaattgcaatttgacactgtaattttaattgggataaaaatatgatgacatctgctgctgaattgccagtaaactctggcttaacattaacattaaatcaatcagaaccagattctcaacacctgactgaaaatgatcccctgaaaaaaccccgtggtgtatacgtgacggtgcatggacatttttatcaaccacctagagaaaacccttatttagatgccattgaacgtcaacctagtgctaccccttttcatgattggaatgagcgcattcattgggaatgttatcgccccaatgcctttgctagagtgctaaatgacaaaaatgaattattggggatcgtcaataattatgagtacatgagctttaatattggtcctactctgatgtcgtggttggaacgctacgatgtggaagtttatcaacgaattttagaagctgatgctaagagtagtcaaaggttaaatggtcatggcaatgcgatcgcccaagtctataatcacattatcatgcctttagctaatgaacgagataaatatacacaaattcgctggggcaaagcagactttaaatctcgttttggtcgtgatcccgaaggtatctggttagcagaaacggcggttgattatgcaactatcaaagctctcatttccgaaggcattcgttttattgtccttgcaccatctcaagctcaacgttgtcgtcctttccccacagaacatgatccccaccctcaatggcatgaagttggtggtagtcaaattgatcctactcgtccttatcgttgttatttaaagccaactctgcaaaccacatcttcacctttgagtgtgactaaaaccacttctctagaaaacacagaaggtttaccttatattgatatctttttctacgatggtccgatatcacgggatatgggttttagtgatgtggtttatagttctcaccactttgcaggtagagtaggtgcagcagtacgcggggatcatcgtcccgcacagttaatatctgtagctaccgatggggaaacctttggacatcacaaaaagggaactgagaaaactttagcctatgcttttattggtgagtttccccgtcacggttggacggtaacaaattttgctcactatttaagtttaaatcctccgagttgggaagtggagttaaaacctgtcaccgcttggagttgcgctcatggtgtggatagatggcaagatgattgtggttgtggtggagaaggtggtgtttggcatcaaaaatggcgcaagccgttacgcagtgcgttgaactggttgcgggatcagttaattgaagtgtatgaggaatatgggagaaagttatttcgtgatccctggttagcaagggatgaatatattgaaattttacgcgatcgctctcctgctaatgtcacccgttttctctcccgtcatcaaacccacaaagttactgctacagaacagatagatgctttgcgtttgttggaaatgcagcgtcacgccttatttatgtttaccagttgtggttggttttttgaagagttatccagaccagaaggaacgcaaattctccgctatgctgctcgtgctttagaattagcaggagatgtggcaggtgtgcagttggaaaaaggtttcctcaaacgtttgggtttagctcacagcaatgtggaacactttaaacatggtgcagaagtttatcgtcaattggtgctaactgcccaaattggatttaaacaagttgctgcccattatgcgattacttccttattcaacaatcacaataatgcgatctctacacaagacagatcggaaaatctggaaacttatcaaaagcgtgtttattgctacacagccaatgagttagattaccaactgcaacgcatgggcgcgttaactatggcggtgggacacttgaaattagtgtcagaaattacttgggaaagtgaaaatttagtatttgcagtgttgcatttaggcggttgggattttcactgctgcattcaacagtttacaggtagacgtgattatagtcacctcaaagaaactctatttacatctttgcaacaggccagcgcggctcatgctattttggcaatgacaaagatttttggtgatgaagcctttagtttgcaaaatctgtttgcagaagaacgtcatcgtattatgcggttgttaagtcaggaaacactgaatagattagaccaattgtatacccagacatacagggaaaattacggtgtgattatggcttttcatcgggatgggttaacagttcctcaagaattgcaagtagcagcggagatagctttaggttatcgctgtatgatgacattgcgtagcctagagcaagatatcaccgaaacccaattaagttggaatcacattttagaattagaggcgatcgccactgaagctaaacatttgcgttgtcagctaaatatacctgaaggcaaacagatattagaacagttaattgtgcgtttgctgtggcaattattacacgaggctaatggttcttttagtacagatatccaaaggttagaaaagttgattgatgtgggatatcagttaaatttgggtatttctctggaaaaatcccaagaactatactttagttgtttacatagtcaaatagttcccctgtgtctcactaacttgaacaacccaaccgaagctaatcagtgtcgtcatctgctaaaattggggcagaaattagccgttgatgtcagcatgattggtgatcggtgatcggtgactggtgattggtgattggtgactgggaaaatacaaataatttctccctgctccctgatccctacctttgccaatatctaacggctattacgcgcacccgatttagaagcagattcattttgcaaccgcagcaaagtattatatatctgacgcttcaaatcggcgttgctttgaatttcgacagtaatttgattaaaccgggcaatgcttaaattattggctgatactatgttttgagaatcgttacaataattaacagctatctccctggccttgtttggtagggaattcatgctgttagggtcattacagacaattttgggaatttcttctccaccaataagttttttaatttctttaaacgcaatttggcgctttggctccatttctaatacagactgggcatagttagtaacttctgcattatcaactggcggaatttgagcatctgctttcacagtcaaacccaaagtagcaattaaactcgcagcggcgagagttgcaaataccaaggactcagaaagtttatgtttaattgaagttcgcaaaaagacaaaataattttcctgcatacgatagatgacacagaataatagtagagatatgatagtagatttgatttattttaggaatcagatgttccggtaaaatcggaattttgatcaaggttgggactggggactggggaagaagcagggggaagttattggtatttttcccaattaccaactaccaattaccaccaattaccaatcaccgtttctgatatacttggcatagttcaatgactttagtttgtaggattgaggtttctgaagctccttgtttgaggctaacttctaattccagcagtaggggtaaagatgaaattagttgttgtacagaaagagatttgacttcttgctgtaagaagtaaatacgtttggggttattgatttccgctgcttgggcgatcgcttgggggttgcgctctcctgtttccatcataatctttacccatagccatgtgcgaaactgccctatcaaagtggcaacaattcttaaacccggttcagccgcatttattagatccccgacaatacccaaagctttagctgtatcacccgttctaatagctgctgctaattgcaaggtgttttgagtagtatttctgactaactgcgtgacagttttcacatctaaaggtttattactacctcccataaacaggcgtaatttttccatttctgtatagagaagcctggtgtcgttgcctatagactccgctaatatttccgcagtttgggaagttaattttacaccgacatcttgagcaacttcattgacagcttgtaccaacaattcagttttccaggggggaataagtgaaaactcgcggatttcggcaaattgtttgataaattttgtagctttgagacgttcatcaggtttactgcggcttgttaccaataaaaaggaattttcaggaattgcgggtaaagtccgttgtaattctgataacgcattttctggacactgttggcataaattagaattgactaaccaaaccaaacgcccaccagcaccgaaagcgggagtcataacttgatttaaagcctgaattattgcatcaggttgatctgggggaaaagcggtatagttaaagcttgtccaaagaggatcaagaaggcgatcgcgcaaagctgcaaccgccttttccatcgcaaaatcatcttcaccccagtaaacgtagattggcataaattggtgatagttgatagttgatagttgacagagaaacataaaattgattacccagtcaccagtcaccagtcaccagtccccagtcctcagtcaccagtcaccagtccccagtccccagtcctcagtcaccagtcaccagtccccagtccctaaataaaataacttggtcaaattatgtaaattttcctacaatctatcaagagagcgcgaggctaagaagattggacgacaactaccaaacctatttaaatcgggtagcacgcatgacgctaccagaatcttacaaaacccaagttcagcatatccaggaatcttataaatttaaacctgttgatggagtcagaaaaccagcaccatttcctggttatacactgattaccccaccagcagcagaagatacacagaacgctgatttttacagccaaattgagacttttcagcgattgctgttagagttaccaatcaattctgatttgattgtacctctacctcctgccagttttcatttcaccttagcggacttgatttgggatcatgcttacattcatgctactgagaaaaatccccaatttgaacaggatttaaatacttgcttagggaatttgtttaagcagtatcaacagttgcggggtgaagtcagtaatcccatttcttggcaaatgctaggactaatagtaatgccaagagctttagcggtgtgtttaatacccaaagatgaaagatcctatgaagaaattattcaactgaggcggttgatttatcaaaatcgcaaattaatgggtttgggaattgagcaacattaccactttactgctcatgttacattaggttattttggcgaaattcctactgatttagatcgggtacaactcagtaatttgttatctgaattaaatcaaaaatggctgttgaattttcccgaaattgtagttcatcgggctgaattaagaaagtttgacgatatgacagcctattatcgtcaacctgactttacgagtttagagttttaatttgttagttgtcagggaatagggactggtgactggtgactagtgactggtgactagtgactggtgactagtgactggtgactggtgactggtaactggtaactggggactggggactggggactggggactggtgactggtgactggtgactgggaataaatatgtttctttcttctttatcctgcctgctgcctgctgcttaaaactctggttgttgataggctaaataaacagcttctaaaaagacatcagaggaaatatcagcaggtaaaattattaaatttataatagattttacctgctcagataattttagtgatagagatgaccgagcttttttagacattccattgcggcgttgtaaatattcacgaataatggcaaaatcatcaggcaataattgagataaatccgagattttttgcaaactgatataaaaagattttgcctcatctgaaatagtaagattggcagatttattaacttgttgggtttgaattactatcgttcctgcgactaaatcaccaaggcgcttttcacttttaatagacataattaaaaaagcgccaataaacaaagtctcatcaataggacgcagtaaagcccggagagaagcttgttgtaaacccaaaggtctgccatcatctcgcaccacacgaatttttgcaatgcgtttaccaggggtttgtccttgccagagagtttcaaaaaaaacaaaataacctgtgtaaataaagaaaagaatcaggaaagcgatcgcagtcatccataaaccaaaaccaggaccaaaaatctctgaaccaatatcatataattgattagaaataaatgcccagactgcgataaacagagctaaacttaaagccaaaatctgatagtcaataattaacgcccaagctcgacttcctataccagctaaggtaaattctaactcaacgctttccggggtgctgaatttgattctgttgaaaaggtgcatgattggaaattatttttcaattttgctttaaatttctcggtcacgtaactccaaacctaaaccctcacgccgacttcttaggtcatagtaaattacagctttaattgattgccagaatggcattacaaacattcctcctagcaaactgatcagcatagaaataaaatacactagtccgtaaatgagcgaacctggttctagtgccagtaagaataaactaggtaaataattaaataaaaatacaattggtagtgtgacaataccagcaactatcaccaccccttgaatacgaaaagctgaagctttggttaactcccaacttctattcacactctccgcaccattaatattttcctcaactgctaatggtacttcagctatcacccaacgagcgtaaaaccaagttagtcctgccacgataataattaccatcaaaacagcgactaaagcggttgtaattatagctccttcagtacctaagatgacacttaatacccctgcgaacaaaccaatcactataccacctgcaattgctagtccaagataaactaacaacagatataaacttactcggaagtaaattccccaaaatgaccataaaagaggctcaacacgatccctggcatctggaagaggttctggttggttagtgagttcgccaaaggctaaacgcgagattagtccagaaatggctgcatattttgcccagccatagataggaactaaaacccacaaatgagctatcaaggctagttgaagatactttttgaggtgagaacgatacaaacgtacaccggcactgactacattaccaatacttaatggttcagcattactggtataacccaagttgtcagacatagtagtaaatgttcctgaaaattacagttggcaattttgagtccatattaagctaaattaaactcagtacccggaaattttatgaatattaaacgttggatcggcagacgagaggaaaattggcaacgtctagattctctattgcggaaagtagaacaaaaaaagttaaaatctctcaaatctggggaaattagagaattagccagcttatatcgttccgtagcggcagatttagcccgcgctcgtacccaggaagtaggtaatactttaattcaaagtttacaatccctcacaactcgcgcctatactcaaatttatcagggttcacgcaaacaagaatggcaagcagcgttagaattttaccgttttggatttccggctgtagtgcagcaaacatttccatacatagccaccgccacagctttatttatcttaggtggtttagtagcttggtggtatgcttggcaagatcccagttttatgtcgctgatagtaccaaatcatataatttcccaggtccgagataaaggtgagttatggatgggttctattgtcggtattgaacctttggcatccagcaatattatgattaataatatttccgtgtcttttgttgctgtcgctggaggaattactgccggattatacacaatttatattatgatatttaacggtttattaattggtgcggttggtactttagttgctcaaaataatctcgcttatccattttgggcgtttgtgtttcctcacggttcaatagaattacccgctatcttttttgcaggtggggctggacttttaatagccaaagcaattatatttcctggtaaatatcgccgtcgagatgcaattaaatattatagttctctagctgcacaattggtatttggaattgtgccgatgttaattatagctggaattattgaaggttttttctcacctaatcctattgttccagacccgattaaatatttagcaggaatgggattgtttatatttttagtgctgtattgtaatcgtaaaaataaattggttaagggataaaaaattaaaaattaaaaattaaaaattaaaagttaaaaattaaaaaggaatgaagaggaagatattttagcagtaagggtaattcttcctcctgactcctgctaaagctgatttctggctttaagttttagataactttcaactaattgatcagaaatttgatttgctggtgcatccagaaccaaaacacctttttgttttaattgggcaaaagcaacttgtctttgtgctaataaatctagagatactgcacgagtataagctgttgtgatatcgtcagtaaaattgtgtgctatgtggtcaacttggggatcgcggagggtgacacaaaaaggtaaataacggggtgctaatttgcagagtgcagtgagaagttctgaagaagccgtaatatcaactaagtcagtaattaccactactagcgccctgcgggtttgctgttgaactacatgagtgacagcgcctaaataatcagattctaataatactggttcaatgggagtaagtcgatcaattagttgattaaggtgatgttgtccccgttctgggggtatccaggtgtgtacttgacgatcaaatacagctacaccaacgcgatcgccccgatgtaaacccgccaatgctaaggataatgtggtatttaaaccccagtcaaatcgctgtaaaccctggactctggcggtcatcaatcgcccacgatctagtaaaatcagtacagtttgttcctgttctggttctaaaactctgactaatggacctgtgttaccataactacgtctagcggtagctttccaatcgacaaaccgcaaatcatcaccgctgcgatagttccgcagttctgcaaattctgttcctatacccatttgacgaactttgcggatagaaccagatgattgtaatgtcagacgaatcgagagcgatcgcaaccccattaaatcaggatacactttcacccgtgtattttggggaatttgccaatcatcccaccctaacccccaatttcccaactgtcgtacttgaatatttccccaaggaaaatctcctctttgatttggttgtacagtgtaagttatctcttgggtgttatttgcagaaagattaacgctgagagtcgatgtagaaacagtaaactctgtcggatagtaatcacgaatttgaataatactatttgtatttcctgattctacctttaacactactggattatcacggccaatagataaacgtgagggtaattcccgactaattttaacgcgagattttctcacttttaaactatcaataaccatcaatcctaaaaccacagcatcaaataacaaagttaaagtgatgctttggtaaatacccacaatcatggataaaatgggtgatacagcaattgctaaacctaataaaaaataaacttttttagatggaatcatatagttcacaggtgacaggtgacagaaaaaagtgaatagttatcagttatcattattcatgctttattgttaactgttaacagttaacagttaagtgacttctgatccaatttctttatgaggctgcgcctaaattcttcatctcttatttccttctttctttgtgtcctttgtgtcctttgcggttagttcattcttgaatttagcgcatctttatcaagaattggtatgactcctaaattcttccaactctgattataataaattcataccttctcttaaatgaggattgagtatagttcgccaagccttcagttttttattataatctattcggcaagtagtttgtctttctggtgggatacctatattttctaccaaaacatcatactctttggggtttttaccataaaccaaacaaataatattataaaacctttgataattcaaagagtgttcatcccaaaaagataaatcttgacttacactttccatttcctgatttccagataaaccaaattggatagcagaagctaaagctgcaaattcctgtcctaattctgataataaaattgtcgaaaattcatcaactgtatcttcttctttaccagttacaggtaaatctaattcttcgatgagtgtatgtcctaattcatggaaaaaagtaaaaaccgttgtacctgctacccgacgattaactttattaactatttccggttcattaatatttaattcccttgattgatagtattccataaatacatctgtgaatctatctattaattcatagcaaagagtaatactatgttcagaggatttataataggcgttgacagcaccacagtcacccaaaacaattttgacatcattgggcataattaaaactctatttagcttttgggctaatttttcaaatgattgatatttttggaatctttcttgtcttttgataaaatgtttgcgctgtaaaggagtataaattacttgaaattttcctgtagcatctacattattactattatgcctattcctaattatttcgttagtattgccaattaatttaactggcgtttgcttatcaataggattgatagaaataacaattatacataaagctagaatactgactaacaggaaaatttttagtttaatattaattgattgcaaataattgaataggtaagacatactgtggtatatacaatatgattgaaaacttggtaaggagtcagaatttttgataaatttgatcaatcagtagatgaacaatgagagaatgagaggatgtttgtaaagtctaatttgtaaagtctaatttgtaaagtctaatttgtaaagtctaaattaatggcaaataaaaacggtagcatccccaatgtgtaaatttatttttatctaacggaaaaatgatccaaagtcctgataagctgatgtgcagctaaactgtataattaaaaaatctgaagttacagtagcacaagcatcttgtttgtattaattattcaagttaaaggaacaacagcttatgattgaaccgcaaagacgagccagtgcgttgggcagctctgccgacttgtagcaactggcgtgcaaaggacacaaaggtaagagagcaagtcctaagttgacaatttcatagacaaaactatacttatattgacaaaaatcaatatatttttaggaaaaaatcaactacttgatatataatacggtgatatcaagtattgaattgagactattgccgacgcgaaaaccaagcaatgatggtggtagtctttttcagaaacttaattggaacacaatcgcgtctggctaaggcgtgaaagtctactgagggataactgctcccatgctcccgttgaagtagaaagtaaagtctagttttgtctaggttttatatagcagatgttttcgtgttgctgcggttatcttttcaaaattgggatgctcccgataaaaacagcaaattgctgattatctgggaactggaacttgattaattaccgcagctattaccgcatcaatttgtaaaccatccagcattgcttctggtttcaaaagtaaacgatgacgcaacagtggagacgcaacagctttgatatcatcaggtgtgacaaaatctctacccgctaaccaagcagatgcttgagatgtttgtaaccaagcaccagcagcgcgaggagatgcacctaaagctaaatcaggatattgacgagtttttttcaccaattccaagagataatcaactatagcttcagataccttaacttgtttaacggcttgcctagcctctaaaatatcagctactgtagtgattggttttaacttggcaatatccaagcgtctagctgcaaaacccgcttgtcgatttagtaacatttgcttttctgctgcttgatctggataatctacaactagcttgaataaaaaccgatctaactgtgcttctggtaagggataagtaccttcaaattccagggggttttgcgtcgcaatcacccaaaataaatctggtaatggtaagctttcaccatctaaggtgacttgcatttcttccattgcttccagcagtgcagcttgtgttttggggggagtgcggttaatttcgtcagcgagtaaaacttctgtaaaaacaggaccttttttgagtacgaagttgcgactatttaagtcgaaaatatttgttcctgtaatatccgatggtaaaacatctggtgtaagttgaatccgtcggaaatctgcttgaattaactgcgctaacactttgactaggagtgttttgccagttccgggaacaccttctaaaattatgtgtccacctgctaacaatgctattagcgattgcttaactaggttggattgtcctacaattatttggtttagtccttgtccaaggcgaattaatacaggatgtgttgcactcatatttttatggataacgtaagttgctaatcaagaaataggagtcaggagtcaggagtcagaattaattttttgtctatgtttccatcacggttataactagcaacttgctaataattcaggagtcaggagtcagaatatttgatagatcagtagattatcaaatcttgagttaaagattaatttttagatgttagattttgaattgtgatttttccgtaggctttgccatttccctaaccagcttatcaggtcttgttcactgattcggtgtttttttacttgtagttttaagactgcatctagttctgctgcatttttacctgtttgatcttgccaaactttgagtaaaacttcattttctactagtatttgacctaatcctaatactttttgtagttgcagttgttcttcttttccgaccatttccagtacaaaatcgctagattctgctttttgtaaaactcctgctaatgcttgtatgtaagcctgactgttatctataactggtgtatctaaagtgacgggtttaccaaagcggcgattttcagaccaaattagcactaataacaataccaccacctgtaccaatgctggaaataaaggagttttcgccaagtaacccaataaatcgcctcttccttctttctctctgatatcaggatctttgtatccgtggatatattcgtctataagtattttctggttacctttggtaactaaatctgctaaatatacaaaatttgcttcttcttgataagcattggcggctaaatggggagtggtagcgaaaatgactttgcctttaccatatttctcttcccagactacagcaccatagcgatcgcctaacaaaacttgttctaactcttgttctgactgagatttttgatatcttctgctagtgtcaattttgacatccccaaaagctgatttttgattgctgctaaattctgccgctgttggtggttgttttacacctaaaatcactaaggtattacctttttttacccattcaatttgttgtgaataaaacattgggtttctgagagtgctgttcacctggagcaaagttacagggtttgtttcggtttcaatatcactaaaaggcttttgccaatgttggatatttgtgccttgagattgcataaaagcataccaagcaccataaccttcaggtgcgcgattataactagaaccactattgattttactactaggagcaactgttatgctaagtaaaattatggctgctagagcgatcgcacctagccaaataatgcggttacggcgtttcatatttttaggtgactggggactggggactggggactgg

SEQ ID NO: 70 - DNA, 28838 bp, Sphaerospermopsis sp. LEGE 00249
  LEGE00249_86
actggggactggggactggtgactggggactggggactggggactggggactggggactggtgactggggactgggtaatcagtttgatatttccctataaactaattacccattatcaattatcaattatcaattatcaattaccaattaccaattaccaattatgagattgtggaatttttgggttaatactttaattttatctagtcaatataatccaccacgatttattgaattgttgatgttgctgctggcgatcgccatgttaattatttctacaattataccagatacaccttatttggtgctgggtttaagttttgtacttggggcttcaatttctattttggttcgggaaacaatatctatcagggaaaacgttcacccacctctttaccaaagattaattacccaatttacagcttgtcttttactcagtattagtatttatggttttgtggatttaattcggtctttgtaagggtgattggtgattggtgattgggaaaaggtcttattaattaagaattacgaattgcaaattatataataaaaattatgaaactcagtttgtgcatgattgttaaaaatgaagaagctgctttaccaaggtgtttagaaagtgtgcaaagtttggtggatgaaattgtagttttagatacgggttcaactgataaaacgccggaaattgctcaacaatttggtgctaaattacattattttcaatggtgtaatgattttagtgcagcgcggaatgaggctttaaaatatgtgactggtgactgggttttggtgttagatgctgatgaagttcttgcaccagaaattgcaccacaaattagagaagcgattaatacagatgattatatattaatcaatttggtgcgtcaagaagttggtgcgactcaatcaccttattctttggtttctcgcttatttcgtaaacatccagaaattaaatttgaacgtccttatcatgctttggttgatgatagtattgcggcgattttaaataaagaaacttattggcaagttggttatttaccacaggttgctattttgcatactggatatcaaaaatctgctattaaccaacaaaataaatatgctaaagctgcaactgctatgctggaattttttgcaaatcatccagatgatgcttatgtttgcagtaagttgggggcgttgtatgtggaaatgggtaaagttaatgagggaatagagttattaaatcggggtttaattcagattgttggtagtcgcaaaaaaacagataaaaaaccttttgcttggttgaaagattcaccttctaatcaggtgagaaatctgtgggatcaagatattcaagaaacaaattatgatattttgtatgagttaaattatcatttgggtattgctcatacacatttgaaaaactattctttggcgatttcttattatcaagcggcggttaaattacctatttatcctttgttgaaattgggaggatataataatttgggtaatttgttgaaagctacaggagattttccaggggcgaaaaatgcttatgaaactgctttaaaaattgataatagttttgtgattgggtattataatttggggatggtatgtaaagcaatgggtttgtttgttgaggcgattgatgcttataatcatgcgatatttttaaatcctaattatgcagaagcttatcaaaatttaggggtggtgttgttgaaagtgggtgatgtgaagaatagtttggcagcttttgaatatgcgatcgctctccatgaaaaagataatccgcaagaggcgaaaaggttgcgtcagggtttgcaggaaatgggatttttgaggtgacaggtgacaggtgacagtatttaagagtgttttctgaaaacaaaaatagagatttttaggtttcaattcctcatagggattattgtaaatttcaacttgtctgaatcaggatgtccaggattttaggatttacaggattaagctgttatgcagctaaactgtataatcttaatattcttaagtcttgtggaacaggcatcttgcctgttaaccttatataaattaaatgcacaacagcttatgagtaattttaactgcaaccgccatcacaaccaccactgttaaaataatttttcaatccctaatagggagtaatggaaattgcaataaaaaagacgtaaattgtctgaagacaagcgtggggtttcaatccctaatagggagtaatggaaattgcaatttgcaataaacatcggagtcaattaatgaatatcgtatccctgtttcaatccctaatagggagtaatggaaattgcaatttcaatatcataattaaatagtagccgtggtaaaatcatcttgttgtaaacaaatatctgccttttttttaagttgataaatatccataagaataaatacttaataaattatttccttgattttataccaaaaatatgtgaagctacacagaatcatgaaatccattaatttatcaatccctatccgcgtttatctgcgtttatctgcgttaaaatatattgtcataaaatcaagatttaggaattaaacagtgcagcaagtaatcggtatagacttaggtggaacggcaattaagttaggacgttttacaacagatggtaaatgtttacaatctataactgtggatactccccaaccagcaacaccagaagctgtattattaaagatgatagaggcgatcgcacaagttgatccagataatcaaagtagagctatcggtgtgggaactcccggacctgctgatgctgctggcagagttgccaaagttgccattaatctggtaggatggcaagatgtacccttagcagattggctagaagcaaaaactggcaaacccactatcctagctaatgacgctaactgtgcaggtttgggagaagcttggttaggtgcaggccgtaattttcaacatttaattttattaactttgggaactggggttggtggtgcgattattcttgatggtaaattatttgtgggacatcaaggagcagcagcagaattaggtttaattactctcaaccccgatggtccaatgtgtaatagtggtaatcaaggttctttagaacagcatacatcaattgccgctattcgtcgtcgcacaggaaaagaacccgcagaattaggtaaacttgcccaaaatggtgatattgaagccttgacattttggcaagaatatggtaaagatttgggaattggtttaacaagtttaatatatgtactcacaccccaagcggtaattattggtggtggtgtaagtgcgagttttcagtatttcttaccagcaatgcaagcagaaatagaaaagcgagttttaccaacatcccgtttaggtttacaaattttaccagcagaactaggtaattcagcgggaatggtaggtgctgctaagttagcttggggactggtgacagttgacagttgacaggtgactggggaagaagcagaggaacagggtgcagggtgcagggggaaattatttgtattttcccagtcaccaatcaccagtccccaatcaccaatcaccaaattaggaaacctgcactggtttagatgtattcttactgtgatgagtacgggaaatagcagcttccatgaaacctttaaataaaggatggggtgtactcggacgagattgaaattctgggtgaaactgacaagctataaaaaatggatgtttgggatattcaactatttctactaaccttccatcgggagaagtaccactgacaacgtaaccagactctaataaagcattgcggtacaagttgttaaactcataacgatgtcggtgacgttcataaatgacttcttcttgatataaatcaaaggctatggtacccggttgcactcgacaaggatacaaacctaagcgcattgttccacctaaatctactacgtcttgttgttcaggtaaaagattaataatgggatttgtggtgtaggggtcaaattcggcactgttagcatctgctaaaccttcaacatttctcgcccattcaatcacagaacattgcattcctaagcataaacctaaaaaggggatttggcgatcgcgtgcaaatttaatcgcggcaattttgccatctatcccccgactaccaaaaccaccaggaacgagaataccatccacacctgcaagataattttccgctgactcagtttctagggtttctgaatttacccatcttattcgtaaatcaccgtaagtagaaatcgccgcatgacgtaaggattcaaccacagaaagataagcatcacttaaacgcacatatttaccaacaatggcaatttccacgctatatttaggactatacattctttctaccattgtttcccactgacttaaatcaggttggcgttgttccatttgcaacaaatctaaagtttgttgtgccagtccttcccgttccaaaatcaggggtacttcataaatgctactagcatcttggcaggtaatcacacattctactggtacatcacaaaattccgataatttctgctttaaacccacaccgatggggcgatcgcaacgacagactaaaatatctggttgaataccaatggatctcaattctttaacagaatgttgtgtaggtttggttttcatctcccctgctgaagcaatccaagggagaagggtgacgtgcatatacaaaacattctgtcttcccacctctttccgcaactgacggatagcttctaaaaatggtaaagactcaatatcacccacagtcccgccaatttccgtaattactgccgccggatttgtttccttagcaactcttaaaattcggtctttaatttcattggtaatgtggggaattacttgtacagtcccaccattataatctccccggcgttctttattaatcacagattgataaatcaaaccagtagtaacactgtttaaccgggacatagaagtatcagtaaaacgttcataatgtcccaaatccaaatctgtttctgcaccatcttgggtaacaaaaacttccccatgttgaaagggactcatagtacctggatcaacattaatataaggatcaagtttgagaatagagacagaataatctctagattttaacaacctccccaaacttgctgctacaatgcctttaccaatactggaaacaacgcctccagttacaaagataaacttagtcatagtattttcaatttctagcaacttctaaaaatacatcctgtctcttgaaggatcaagcgtgcgcccaagggctaaattatgaagtaaacattcagctaatgcttaaaggtaagctacctcatcagcttttagcagtcaggtttttaacggttacgccaaaaatcatgattcgttcatttactgatttatcaaatattctgactcctgactcctgacttcggaattttcgctttttatgcttcattctttatcctttattgcccattgtctcacagtcattatcgtaaaatcttctgtgttttgccgtgaaaaaactcttaggattagtagtatttaactgtctgcttacctcctccgttgcttttgcacaaacatcactcctagtagtttttcccccaacaaactaccaaaccagtaaagaaaaaatattttttatcggtactgcaccaccagatggagaagttctcatcaatggtagactaattaaccgcagcaaggctggtcatttttctcccagtttccctttacagttaggggagaatgtatttaaggtacgttaccaaaatcaggaacgagagattaaagtaacaaggctttctactcaaccagaattaccacaaggtttaggctttgctaaagattctctgactcctgctgttgatattgccaaactaccgggagaactgatttgttttggtgcggttgcacctcctcaagctggtgtttctgtcaagttggccgaaaaaaccattcccttattaccacaaccaccacaggcgcaattacctgttaattcaggtgtactaaccggaagaaatcaacccacaacttctagtcctaacaaatatcaaggttgtacaacagtggccaatgctgctgatttaggacaacctcaatatagtttgacattgaatggtcagactatcactgaaactggtaagagcaaaattgaaattcttgcacctgcacagttgccagttgtggaagtgtcagcaacatcaggtgttgctcgcacaggtcctagtacagattattctcgactgacaccactaccacagggaacgagagcaacagttacaggcagagaaggtgattggcttcgcttagactatggggcttggatcaatagtaaagaaactagaattataccaggtgcagtaccaccacagactgtaattcgtagtgtgggatatcgtcgcttgtctgatagaacagaaatcaggtttcctttacaaatgcccatacctgtaagtgtggaacagagcgatgggcaaagccccgccttcggcgatcgcacttttagtctcaccctttacaatactattgctcaaacagacaccattcgcctggatgatgaccccttgatttatcgcctggattggcaacaggtgagtcctaaacaggtgaaatatacctttaacctcaaaaacttccaacagtggggatataagctgaaatacgacaacacaacgctggttttgaccttgcgccatgcacctaagattcacaacagaaaacgcctacctttatctggtattaagatattacttgatcctggtcacggtggtaaagagtctggtgcaattggtccgactgggtatccagaaaaagatgccaacttggtaatttctaagttactgcgggatgagttggtaaaacggggtgcaaaggtggtgatgacaagggaagatgatcgggatgtgtctttagtggaacgtcagcagataattgaaacagaagaaccggcgatcgccctttctattcattacaatgctttaccagatgatggcgatgccgaaaaaaccagaggttttgggactttttggtatcatccacaagcacatagtttagcaatatttttgcaaaatcatgtagtaaaaacattgaagaaacctcattatggtgtgttttggaataatttagccctgactcgtcctgctgctgcaccttcagtattattagaattaggttttatgattaacccccaggagtttgaggagatcgttaaccctaaagaacagcgaaaaatggcgcggactttagcggatggggtgacagagtggtttaaagctgcgaagtagaaaagagtttcgcgcaaagacgcaaaggaagagagggggaagcattcaggcaaccaattatcaattttatgaccaggctattttccgaatgcttcgcccctacttcgcccctacgactgctgctgtataggaattttcacagtaaaagttgttcctacacccactttactttctacaaaaatttctccttgatgtcgatctacacattttttcacaattggtaatcctaacccagtaccaacaataccttcaacattttccgagcgataataaggctcataaagcctcacctgttcctctggagaaataccgataccttcatctatcacttgaaaaatagtagcatcctgttgagcatttaaaaacaagtaaattttaccccctggtgatgaatatttgatagcatttaacagtaaattactcaaaatagaatatagtaacttttcatctagattagcccgaaaagattgaccatatttgataaacttaatagtatgagttgtgcgactaaacatttgcacatcttccagcaaatttaaacaaaaattttccacattaattaattgaggtttataatctagttcacctgcctccgctctagtcaaagttaatatatctgttaataggtgattcattaacttagcagaagactgaatccggtagagattttttaactctttttcatctattaattctatcaaaatttcccttaataactgacaagatagcaaaattacacttaaaggagtacgaaattcatgggaaatcatagaaaataactgaaccttgagttcaccaatctttttttcttgagctaaggaagcttctaaagatttaatatgttctcgtttcaccgattgactctcaattacaaaacataaaatgcaaattactaacaaacttaaaaaagttcctataatttccatgattattcgtaagtgaataccattttctgactgctggagataagttttcaagtaactttgttcttccccttgaatttctaaaaatatcgttataatttgctctctgagcttaacactaagttcggtaattttattttgccgttgccatgcgttttcatctttttgataaagttttatagattcttctaacagagataatctttgattaaacaatgattttaaattgtttaacctctgtctttgattgatatttttatgtatttgaatatctaatagattgaggtcatttttaatattattgatagcagtttgataacgatccaaatcttgttgactgcccaaaaatatatacccccgtcgtgctgattcagccacagtcattgctgcataaaaatctgtcaaagtattgagtgtttgagaagtatgttgaacttgagcaacattttccttaatttcggtagtgttgtttaatgcagcgaaagtaaccaaaagcatcagagatatagccaaagaaactcccgcagaaatccaatttactgaaaaatgcaatttcataaattacctttttattcagatagtcaatttaagttaatatttccctcattacttcatgacttgctgtggaataaggaataaattatgcgaattttaatagttgaggacgatattcaactggcagaagcactaatagaagctttaaccagacgaaagtatatagtcgatgttgctcaagacggagaagcagcttggcacgcagcagagtcaatgaagtatgatttagtggtgctggatgtcactttaccaaagttagatggcatcagattttgtcaccgcttacgcaccactagcaccaacagtccagcacatcgtaattcagcagcacccgtattaatgctaactgcccgtgataccgtagccgataaggttgctggtttagatgccggcgcagatgattatgtagcaaagccctttgacttagaagaattaatggctcggatacgtgctttactcagacgtggtagtgctgccagtacagtcagtttatcttggggaaagttaactttaaatcccagcacttacgagactacctatgatggtcatcttatgtccttgactcctaaagagtatgcaattttagaattgctggttgctaatggtagaagggtattgagtcgttctagcatcattgagcaggtttggtctgttgatgactctccagtggaggaaacagtaaggtcacatattaaaagtattcgacagaaattaagagctttaggtgcgccggaaactttgattgaaactgttcatggtttgggatatcgtctcaactgatacaattgatacaaaattatagggaatttgttgttaatctgttcaatgtagaggcaattgataaactgtctctaccagatttttatatctcacaggtttcatttattaaatgcattgttagaaaagaataaactcaccatcatcatacaactttctagaaaagttgatctgcacaaattctgcacaaatcttgcacagtaattgcatatataggttatatcctgagagagtaaaaattctttttgctcaggaaagattgaactaatgaattagcatttgagtgatgattgattactaagaacaacaacaaaaacgcctttccgctatcttcaaatcatgtattaatcaaattactagttatccaaggtgcgtgaactaaatcacattattttcatcaaaggaataaaaaatgttaacgaacattgtagacgatggtcgtggcagtggtaggtttactctaggtggtttacccttttgtgtgcctgtgtaaaattggcatagcaaacaacccccaagctaaaccagtaattaaaccaaaaggagtaacaatataattgttaaaatcccacaaactaaaaacttgcgctgctaactccaaaggataagccatcattaacacactagcaaaagcagcaccgatccaaccatattgatgtaaccagaaacggttttttccctgggtaaagatatacaaaatacgagtaattaacaaccctgtaaccgtgccataacaacgcatacacaccgccataatgtgaggtggtgctaactctaaacccatagtaggttgaggacagacatgattacccataaaataaataatatccgcaatacctggaagtacaaacacaccagacgcagcaagaaaaggtgcaatagggggaccaaacaccattcctactaacaggaaatcagcaaaaaaactcacccaattaatttttttaatctgtaaatctcttgataaaataaccctttgcatttttctctgtgtcctctgtggttcgtttatttgtgattaactagatccccgacttcttagatcaatttctgattttagccaaaattaataatagaagtcgggtatcttatcacttgattactaattatagatcatcatctggatctatccccattgctcgtaaacgttcagctaattttgcagctttaatttctgcttgttctgctctttgttgttgttgttcagttctcaatctttctaactgtgcttcttccttaccgaccaataataaattaccctgattatcccaccaacgtaaccaaacttgatcgggattatttaagtaacttccttgccataatcctaattctacacctaatggcagaattggataatgtccccgttcattaggttgcattttttggtaagaaaaatctaccaaatgataaacttctaaattgccactattaacttcataaatcgcatagtagggagcgcggataatgcgttcataaacccaaaatttcccaggtttttcacctggttgtaaacccgctaaaggtgttttatctcgttcttcttcaccattaccactggctaattctatgacaattaaagggggaatatattcccgccatagaacataggatcggcgaattttaccatctagcctgggtggaacatcagggacataaaaccaatctggtgctactgtacctttttccggtggttctgtttctcgccaataaatcccgcaatcttgacctatacaaaattgtccatcgggatgtaatttttgtaaagtttgaataattgaatctgtgatgattatgctttggggatgttcttgaaagttcttcacgaatgtaccatcagactccggtagttgagtatgatcaggaaactgtggaggtatggaaatatcagccagggtttcactcatactatttaaaggattgcagttattaatttaagattatatcgcatgatagtaaataaaattgtcagaatcaggtggttatcgagcgacttgtactgagcgaagtcgaagtaagtcgagataatgtccaggatttaaggatttacaggatgttatttgtaaatagcctagagatttttcattaaagccactaaaattttcatgaaaatttctaaatcagtgggtacacgataaaggtttaaatcttgagtgatttcttttgatttacgatgcaaaatcacaaattgccaaatcttaccaatagaaactcaattattggtttttttccatagttatttttttcagcttccatgttttcacaagctaattttgagttaattatgttttttcttagttttgtttatattataactctctgcgttctctgcgcctctgcgtgaaaaaacaaagacacaaaaacgcacagaaaaaacctttgcgtctttgcgcctttgcgtgagaaaattcttaacctacattagcaacataaggactcgtcaacttatccaactgttgaattaacaaactcagaaacaaacccacatccgtaaccacacctacagactcaattgaaccgcgatcgctcaattttgtcaccaccgcagggttaatatccacacataccatcttcacccctgctggtgtcatatttcctacaccgatggaatgcagcatagaagacagcatcaaaatcatttccgcaccttgaatgatttgagcatattcctgttgtgctaaaatcaagttcatttgcgtatccggtaggggtccatcatcccgaattgaacccgcaagagaaaaggaaatgttatttttcacacattcatacattaccccgctgtttaccactcctgcatctacagctttagcgatgctaccaaaacggcgaatggcgttaattacctttaagtgatgtcgatgtccaccacgtacagctacaccgcgtttcatatccacaccgagagatgttcccatcatattttgttcgatgtcatgaactgcgatcgcatttccccctaaaagtccttgaacataaccttcacgaatcaatctagaaagatgttctccgccgcccgtatgaattaccactggaccagcagtgacaactactttaccgccagcatcccgaattttacgtaattcccaggctacttgttccaccactaattctacccgtctttcactggaaacaccagaagacataaagctaaattcctgggcgttacgttgttcgcgggattcggttttgcggatagtgcggataccttgaacgtcaactactacctgttcaccaatttctagatcacgcaaaattttacatctagcaactaacccattggctgtactagaaatagcgatcgccccatccatgcgttgattttctactttcagccattgtccatttacccttacttcggtaggataaatcgtactgacatagaaatcatcaggagcaacacccgcttgtaaaactggttcgagttttgcatctctttcatcttggggtaagtcaaccgcacccaaatcaatcaactgggatataatctcttccatcacctcatgggatggtgcagaaaccctgacttctgctgctgaggtgctttgacgttgttctcccaagttgaacttgagaacttggaaacttccccccatgtctacgatcaaatctaaagcgcggttaattaaacccgcatctaataaatgaccttctaaacgaattatccgactttcgacttgagttgtagcgtgtacttcttcccgtacaggttcagtcactcgtaaagttaagcatttagccgcaccaccagctttgagaaattcagttaaaggggtttcaatcacttgaaaaccaacttccgctaaccgtgattttaaactatcactggctttgttcataatcacgatgctttcgatgttcaccgcattacaagcaaagttaaccgcatcagcttctgcaatggcaatacgtttttctggtgcaacgcgcatttctatcacccggttagagtaggagtcaaacgcaccggggtaatacagcaaatacccattagctaggggacagaaacaggtatcaagatgataaaatctttcatccatcaaccgcagagaaatcacctcaatatctagccatttagccaaataggggtgagaatctaactcagaacggaaaccataccccgcccataaccagcgcccttccctatctaaaagcgcgtcacctgcaccttcaaagggtaagtctttaggaagtgtgtaaaccttaaaaccattattttcaaaccactgttgaaaatacggttcttctccttggcgttctttatgtaaaaaacggctgagaaccacattttcaccaagaactaaaccagcattggcactgaataccatatctggccaacctttttggggtgtcactaaatcgacaatggcatgatatttgataacattgtataatttattccactgttctacagcgcgatcgcgtgatgatttgtgaatattcccttccatccacggattaatcacatagtctacatcgtagtggtcgggagcgcacattaaaaaccgaatttgggaaaccataaaaaattttactttgcttttcagtaatctcttctggatacagagttttggtgttctaagtctgtcaaatctgctacttaatagctaccttttgctcttggtagactataccaggatatcgttcctattctattactgctatagggaaaagtagaggaaaagttaagaagtttgtatgctaatgcaatattaacttgttgattgatgggttatttctattgtatgctgaatttactcttaattaaattatggattttattgaatttaaaaaaatctgaatcatcacatggctttctttagtgagtttattgtatgcttcactagattctggatcaggatacttaggaaaatttttcttacaatattcgatagaatctttagcattcacacagaattttaggaaagcagtggcagggcaattaatataatcttcatgttttaaatgtccttctatttcattaagaaacagatactcttgtataggcttttcttctatcattactgtagtagctattcaacaagcaaagtattattcttatcatcatattccgaagttaaattttagtcaatttcagtttaaaaactcttgcaattcaaaataatagctgagtcctgttgggctgacaccgtaaatggtgctataatagtgtcatgtctaccacaccactgcctcacgttgttatagatactaacgttgtatttgaaggcttgacaaagcagggttgcgctgctggtttagttattgatacatggttagctggtttacttgtggttcatgtgtctaatgccttagcttatgaatatgaagatgttttatctcgtaagctctcagaatctcgttggcaccaaatgcaacccgttttaggaaaattgctcagttatgctcattttacaaatatttactacacatggcgaccaaattcaccagatgcaggagatgaccttgtaattgactgcgctatgaacgcaggtgcaacagttattacatccaacattcgtgactttcaaaatgcaaaagaatctttaggtttagcagtgatgacaccgacacagctagtaattaaattagcctctggagaaatttagctatgagtagattaacattgagattaccagctacattacaccaacatttaatcaagttagctgaaactgaaggtatttcattaaatcaatatatagtttatgctttaacccgccaagttgtatccacagattttattcaagcaacaccagaaaaagaaataagtgaacaggaacaaagttttcaaacactactagaaagactaggaaaagcttctgaaggtcaaattcaatcagttttagctgaacgtgaagttgtagaaccagaagcagaattaagtaatgaaattatcgcttctcttcaacaaaaaataaataacgcaatcaacaaaggacacaataaccaataaaaataaagaattttatataagcgttaccggattaggcgttaatgtaatcagcttgaaccgataaagttacttagattttaattgttcacgtaacgatatataacagttttggttacttcctctccgaaagttaatttccgtgcaatgatgggaaatgagaagtaattcggcgacggcgtttgtttttaatattgataggttttttccttttggtacttacagacttttctccgaaatctaaatctctacactcttatgattttggagaaaatctatgtcaatttatgtaggcaacctctcttatgaagttacccaagatactctaactgcggtttttgcagaatatggttctgtaaagcgcgttcaactacctacagatcgtgaaacaggaagactgcgcggttttgggtttgtggaaatgagtacagatgaagaagaaacatctgctattgatgcccttgatggtgctgagtggatgggacgtgatttaaaagttaacaaagctaaacccaaggaagatagaggtggtggtaatcgcagtggtggtggtggttataatcgcaatcgctactaagttataaaatcaagcatttttgctaatgcaatagttttagcaaattaattgaattaattaaaggctcaggtatgacaaaatagtaatacttgagcctttttaatggataatctcagattagggctgttcagaaatctgcacaattaatttacccattttctcaccattaaaaagtttgagaatagctgtaggtgcattttccaaaccctggacaatttcttgctgatatttaagttttccctgttgtatccattgtcccatctccctaaaagcaagatcccattgactcacataatcagtgacaatgaaaccttgtaataatacccgcttcattaaaatctgactgaaattataaggtccaggtaaaggttcttcagtattataagtagaaatcaaaccacaaagaggaatgcgggcatttaaattcacttgtgttaaaacagcgtccagaatttccccacccacattttcaaaatagatatcaattccatggggacaagatgcagctaaagcgggacttaaatctgcggttttataatttattgcagcatcaaaacccagttcttctaataaatagcgacatttttcatcggaactggtgatccccactacacgacaacctttaattttccctatttgtccgactaatgaacctacagcaccagaggccgctgagactaccaaagtttctcctggttgaggttttcctatatctaaaagtccaaaataagcggtgcaaccaataaagctaagaaccgccataaaagcagtgaggggaactgttaagggttggggaattttggtgatgtaaggaagatatccagtagtaattaaagcgtaatcttgccatcctaacaatccagaaacgagatccccccgttgaaagttgggatttttagattcttccactatacccagaactaaaccacgcatgacttccccaatttccacaggtggcatatactgggggcgatcgctcatccaaatgcgatgggtaggatctagggaaagatagatattgcggatcaatatttcgcctgcttttggtgtgggaatgggttcttgacgatactcaaagtcacttactttgatgtcacccacaggacgagatgctaaacgccattgacgattaatagatgatttcataaatttgagtttgtttgtcaggatttttgcagattagcaagaatttttattaaaacttagcataattatcgggcagtaagtaagggcaaaatgtcagcattcagccatcagccagaaactgaaaagtatcagtaataggctataatctactcttatgaacactgatgtaagttaacaaaactatgcatctttttactaactcagtcttactcaagacaaaagctgttagcgtagcgtggcgtagtcatttactgattactgatagctgaatacttacggcaaaattagtcacaaaatgttaatttataaaaatataactaattataactaagttaaactgctctacatctaccaatgccttatcttactactgctgcggaaatccgttctcaaattgctaaatacaccaaatctcaaactctttggatagatacagaagtggctgattataaaagtcgtaatccccgattatccctgattcaaatattggatcatcctcaagatatgactggtgacagtgtttatattttggatgttttaaataagtctgatgtgattgctgcttttattgagcaaatcatgattaatgaatctatcgaaaaggtttttcacaatgcaagttatgatttgaaacttttaggcaataaaaaagccaaaaatatcacttgtactttagaaatggctaagtccataccatatcatattctaccattgcctaattatcaactgaaaactttaggtaatgtgttgtgtaatttttatggtattgataaacaggaacaaggtagcgattggggtataagacctttaagcgatgagcaattagaatatgcttattttgattgtatttatctggctcaagtacattcaaaattattagctttacagtctcaagttattacaaaaccagaaacggaagatttatctgtactttcccaaaaatatacagaagtggaacagcaaaaaaaactgattaattctgaatttgattatttacaagaaagattaaaaaaagcgatgcaaattcaaaatgtatcggaaactgaatattatcaactcagtggttatgaacggaaatctgttaaggtgaaatttacggagttggtgagattagtagaaaatgaagatattgatttggattttaccattactttaactgagaaattacaaaaagaattaggcagaaatttagaacaattagatgtagatattgaaaaaacttctgtttggcggttaattactaaatctcaggaagaagatgttaaaaatgattaatggaatgcaaaagccagaatttattatattttgaactcacagaaccctgacttatttaataagtcggggttttaattatttatatttacgtaaatgtatcttaatcaacattttataaaagctgaaatagaattatttatacattaaattttacaattactggttaaattttgaaaaagtaattcatggaatctattagtttcttttagtttctattagattttggtaacaattttttccgggtatgcaagtgattgataagaacttatgaaatggcagttattgacatataatagacaagtgctaggtagaatattaaaaataacagtgattactgttttcagtggaattttatgcgtttcttgcaatcaaaatcaggatgttttagtaacagaaataggggttagtcctccgaaccgactgacacctagaacatccaaagcaggagaattttatattcagggacaaaatcagcacgctaaaggtaattctgaagcggctattgctgcttatagtcgttcaattagtcttaattctcaatatgcacctgcgtttaaaagtcggggtttagcatattttgatattggtaataaagaaggtgcgatcgctgattataatcaagcattacgtcttaatcctaatgatgcagaaacctataataatcgtggtaatgcttttgcatctttgggagatcaacaagcagctatttctgattataatgaagcgattcgtttagctccaaattatgcagaagctttcaataatcgcggaaatgcccgtgcagccataggtgatagaaatggggcgatagaagattatactgaagcaattagaatagatcaaaattattctgttgcctataataaccgcggaaatgcttacgctgccctgggagatccacaaaaagcgatcgcagattacaatcaagccattcgtttaaatcctaattttggtcctgggtttaataaccgaggaaatgcttttgctgctgctggagataaacgcagtgcattacaagatttacaacgggcagcagctatttttgatcgagaaggtaacaaaggattgtatcaacaagtaatgaaaaatattgaagatttgggaaggtaaaaagaataggagtcaggagatcaaggagtcaggagttagaagaaagataaatattcccagtccccaatcaccagtccctaatccccagtcaccaatcactattcttcaaaactaggagtgcgtaaatcttccactaaagcttgaatatcttcaggaggtgggggagtaaaacgggaaactatcaaggtgacaataaaattaatgaccattcctaaagtgccgatcccttcagcagaaacgccaaaaaaccaaggtgtcattccggcaaatttcaccccaataatatagatgattgtgaaaattaaaccactcaacattcccgcgatcgcaccttgagaatttgtccgtttatcaaaaattcctaacactatcaccgggaaaaaactagcagcagctaaaccaaaagcaaacgccactacttgagacacaaaaccgggagggttaacaccaaaatatcctgctaaaattaaggaaaaaccaacaacaactcgccccacaaatacccgtttttcttctgaagctgtttcatcaaaaatacgataataaagatcatgggcgacagaactggaaatcaccaataataaaccggaagccgtggataatgcagcagctaaaccacccgcagctactaaagctataacccaagctggaagtttagcaacttcaggagttgaaaggacaataatatcattgtcaatggtaatttcattagttgctttattcggtgttaactgcaattttccatcttggtttttatcttcaaacgtcaacagtttagttttttcccacttatttacccagtctaattttctcacttcctcaattttttgatcattaaaagtctggatcaaattgtacctggcaaacatggataaagcgggggcagtggtgtatagaatcgcaataaataataaagcccaacctgcggaaaatctcgccgcccgcacattaggaacagtgtaaaaacggacaataatatggggtaacccagcagttcctaccatcaaagcaatggcgatgaataggacatctaacatggttttattagcaaaaggttgggtatattccttaaaacctaaagccacctgaagttgatttaaattattagcaacatcactaaaagtaaatgctaattggggaaaaggatttcctgtaagtttatttgcaatagcaatggcaggaattaaataagctaaaatcaaaatgcaatattgggcaacttgtgtccaagtaatacctttcattcctcccaaaactgcaaaaaaaccaacgatcacaataccgatcatgacaccagtattgatatcaacttgcaaaaagcgactaaatacaattcctaccccgcgcatttgtccggcaacataggttaaagaaacgaaaattgccgccacaactgcaactaaacgagcgagatttgatttatagcgatcgcctacaaaatctggtactgtatatttaccaaacttccgcaaatatggggctaataataaagctaataaaacatagccaccagtccaacccatcaaataaattgaaccatcataacccagggaagaaattaatccagccatcgaaataaacgaagccgcagacatccaatctgctgcggttgctgcaccattagcaatagaaggaataccctgtccagctacaaaaaaatccttggtattttctactcttgactgccaaccaatgtaaatgtaaagaacaaaagaaagtcctactaaaataatcgtccaaagttcaactgacaccgtttatcctcgctttgttttattttttgatattatattttcggtctaatttatccatttggaaagcgtaggtaaaaatcaaaactacaaaaatcaaaattgatccttgttgtgccatccaaaaaccaaaaggaacaccaaaaaacttgattgtgtttaatggttgaactaataaaatgctgaaaactatggaagctaaagcccaaataattaacagatttctgattaaagcagtgttagcacgccaataagcacggcgttgttcttcatccattgttgttatcctggttgaatcatagataatttcaatagccgttattatctaaccagaatccaatttttcatgttaattttttttaatttttgtaaattatcttttgtaaataaacttccgcaaagttgattaaccatactatgtacatataggaatctgatttgatatctgaaattatctatgtaggcaggcaagaggcaaaagggttttagagaatttaggtgtacggagtttttttcaaaaatcaaatattattcctatagtaaaatacaattatttctaaatttttatttcatcctacattccgcagaagcgtagagcaagtcctaagttgacaatttcatagacaaaactatacttgtattgacaaaaatcaatatatttttaggaaaaaatcaactacttgatatataatacggtgatatcaagtattgaattgagactattgccgacgcgaaaaccaagcaatgatggtggtagtctttttcagaaacttaattggaacacaatcgcgtctggctaaggcgtgaaagtctactgagggataactgctcccatgctcccgttgaagtagaaagtaaagtctagttttgtctaggttttatatagcagttaaaaaataattatccccaaaagcctttattgcctttatggctttgcaagaagcagcaatgatgggtcaaataaaacaggagtcaagagaatcaagaaagcagtttagcttaaagcagaccgaatcacaaatttctgtgtcataaacttactagcgaggacgttcattattatcatcaaagtcttcctcttcatcttcaaaaaaaccccaatcatcatcactttgatcagtatttgggggttgataaggagggataattactcggtaatcagcatcataaattgattcggtttttcctacaccagtatttttcggtgattgagaactgtaggagtaaacagaatcagactgagatacatttttccgagcttgctgatttgggtagggtttcgggcttggtgtctcggctggttctgcaaaatcccaatcatcagcttgattaggatctgtttcccaatcatcaaattcattactggtagtgtaatcggtttctgtaactggcctgcgtgggctactgggaggtggtatagtttcttccctgggatttgtcttaacacgcggtgctgttctcgttgacctagatgaagatgctttttcagtaaaataagtagtaaatttaaacaaggtggtaattaaaaaagatgttacaccaccagcagcaatgctaaataaaatccataaagccagtggtaatggttgagttcgcatccccaaaaatactaaggggagggcaggagaaaaattttgaactaacaatagtgttagtccccccagcaccactaccaacaaaattacacgaattccagccatttttgttattagttattagtcattagtcattagtcattagtcatttttatccaatcaccagtccccaatcaccagtccccagcgatgcactgagcttgtcgaagtgtccccagtccccttaaatatgaccttcccagcgttgaatgggaatacaatcaatatctagttgatctaaagcacgggctacgacaaaatcaactaaatcttcaactgtttgggggttgtgataccaggcgggaatggcgggaacaactctcactcctgtttctgctaaggtggttaagttccgcaggtgaatcaggctaaaaggcgtttctctgggaacaatcaccagtttacgcccttctttgatctgtacatctgctgcccgttctagtaagtctgaacttaaacccactgctagtttagctactgtactcatgctacaggggataatgatcatccccaaagttttgaacgaaccactagcaataccagcaccaacatcactccaaggatgacagcgtagttgaccagatagggttactccggcttgagttcgccaaaatttctcttgtgcttggggatctgctggcattcggatattttgctctgcttgccaaaccatgtaagttgatttagatgcaaccagttcaattttatactcagcttctaaaagaaatttaagagcgcgaatggcgtaaatcaggccggatgcacctgatacgcctaaaataagtggtttactgttattggacacgaaaatacccagaaaatttacctaagaagaatttaggagtcaggagtcagaatgaattctgtgcaactggtggatgaatcggggtttaaagcccccagatttatccgtgaagaaaagaaaaaatttttgcgaggtgttacccctgactatgcctacggcacgtctacgacgaacaggcatggggtattctgaccgctgaattctgacttctctttattcatcttcactatagggatctaaatcaaaagatttgatgtgatttggtaagtaaatatctgtgccatcttcattagcaacacttactcctgaacctttgaccatactatcagcgccaactgtgactaaatcaatttgttgacggtagtagtctacacttttgacttgtacggagacgcgatcgcctaatctataggaagcgcgatttttccgcccaaatagtgcttgttgtctagcccgatattcataccaatcatcttttagtgaactaacgtgtactaatccttctacccgcaaaggtgtactcagttgagagccgatttctgactctgtagctgggacttcgatttctacaaagaaaccgtaggattgaacgcctgtaattacaccgggaaaaacttgaccgatgcgctgtttcatcagttgggccttttgtagtccagctaaatcggcttcagcttcttgaacttctttttctcggtcattaatctggacaaggactctatttaaatcgctttgtagttcttgttgtagttctggtgggagaacgttccagttaatttccaaatgagaagaagagtgacgcaggttaacacgctctttaacacgggtgttgcggcgatcgcgcccatattccaataaggcatgatataccctttgcatgagtaaatctgggtaacgccgcaagggtgagctgatgtgaagatactgtggcagtgctaaaccaaagtgagatcctttggtggtgctgtacatagcaggtttgagagtatcttgcaacaggtaggtaagaacttgctcagatggtgattcagcgaaaatactggttaattgctgataatctaggggttgaatttccaattctggatcaagtgttaattccacacctaaattaattgccagtttcagcatttcctggacatcttcaggatcaggtgtaccttgaactcgccaaatagcaggaactcccaaggcgctgagttgatctgccattagttcatttaccatcagtacaaactctgtgatgagcgatcgcactggtgagtcatgaggtactaccgcccccatattaccttcatcatgataaggattttggctaggtggtagattcaactgcaagctaccgcgagataagcgagcttgtttgactgttgtcgccaaagttgccaaatcacgtaatatctctgtactttcaacagatgcttttgttgattcaccattgagtattgcttccccttgctctttgcttacagccatatcaacattaatcacactcggttgaatttcccactcaatcacttctcccagttggggatcaatggtgatgacaaaggagagtgcgaggcgatcgctgtccggtatcaatgaacaacgttcccctaccgcatcaggtaacatcggcaaaattaaatctccgagatacactgatctgccccgcttgagtgcttctctatctaatatctcgtcagcctgaataaagtgagataaatcagtaatatgaacaattaaccgccagggttgactggggtttttctctaagctaaaagcattttctactactctatcgtcaccgtttaccccttctatcgtcagagtaaacaaatcccgtaaatctacgcgatcttttaaatctgctttcagcagctttttaggtaatttcgcggctgcatccaagacattttctgtaaaagtccgagataaatcgtgtttgcacgttaccaagtctatatcagcagcggcttcagcatcgctacccagaatttgtaccacccgccccaggggtggatattgagctaagggataacgcaagacttccacatgagctaagtggtcgatagctgcttctaagttaatgccattggtgagcagtttcaattcaaacagcaaacgatcatccaaaggtacagcacggaaacccccttctacttgcttaatccgtgctagtaaagtgtgattagaacgctccagaatcaactttacctcaccttcaggagaacggcgacgactaccttcttttagaactctcaccaaaacgcgatcgccattccaggcattactgagatggctttcccggatataaatatcctccgagccttccacatcctgaattgcaaaacaaaaccccttactagaacagcggagttttgcttcaatcagcccctcttctgatacacgacgatacttaccccgatctttgactaacagtccaattttttccagcacctccaaagcaatgtgaagtttttccaaactatcttcatcttcacaacccagttttttttccaaaaccttacgagctaccaatttatcatcagtaaaattggcaagaagtgtagcgattgaaaattccatgcagtgaaccgacctttggtcaaaacatcatttttcgtttaatctggttcttccgctttactaaacttactcaaatctacctaaagacttgcagttagcttcctgctttacttaagagtgacggcacttacttaatccacaggcttttggtttggacaaagcttgccctaccttagaattttaggattttccggcttggttatcgcctaaaaagtattttagatgaactaatttacctttttcaaaaccttgtttacttaaatttgagcaaatttaagtatatttaggtaaaattttgagttcagttgttagctctgtatctcctcacagccaacagacacttgttgccaacgaattaccctagagtggtctctcgtagataagacaaggcagcacaagttcctttcagagcgaggctctgctcggaattctcactgcacgaccagaattcacttgggttcaaccttcttcacctaaccaatcttacacagcactcctgatactcgatttccacctgataattacgcaatggaattttgagagatttggtttagagaactcttcaatttccactagctgatacaaaaggcaagtaacagatgtttgattgtctagatttcaacaggtactaccatgagaatctgggttttaactaggagacacagccgattaacctaattttcccctctgtagaatcggtaacaatcaggtaagcaactgaacaagcaatgagggcgaaccttatctttattattgtagatttagagcgcacttccagaaaatacttctagatatctagttgggtgattagtatagcattgaaaggaagacacctgattcagtcagcagtaactaaaattttctgcgaattacgcacaaattagctgctgctacaatcttgactgatgatcatagcgcaaaaagtcgtaggggcgaagcattcggaaaataacctgtgatcaaaattaataattgttcgcccgaatgcttcgccctgacaggaaaataacctgtgatcaaaattaataattgttcgcccgaatgcttcgccctgacaggaaaataacctgtgatcaaaattaataattgttcgcccgaatgctttgccctgacaggaaaataacctgtgatcaaaattgataattgttcgcccgaatgctttgccctgacaggaaaataacctgtgatcaaaattgataattgttcgcccgaatgctttgccctgacaggaaaataacctgtgatcaaaattgataatttatcgcccgaatgctttgccctgacaggaggcaggaggcagaagttcaagaagtcaggcgtatggcttcgctatcaggacgtattaccaagtagttaaatagggcttgctgaataaactcaaaaccttgataaatcaagggtttcaggtggaaaatcaggaaatcagtgcaggatttttcaggggtatactcctaaaagcgtgcattttccgggtgaaatttcaaagaattggttactaacagatcacccaaactcttgcctattccctattccctgccttaacgaagagactttttgagcaaaccctaaatatctatataaaatcaaacaaatctacaaaatacaaataaagtaaaacagattgagataggtggaaatatgatgttggctcagttccagagattgtatcctaacggaagtattatttctgaattagtagagatttttcaaggtaaatatatcgtccgagtcagtctacaaattgaaggtgtcacccgtgccactgctatggcgggggcagacactgtggaagctgcagaagaccaagctagaaatcgggcgctgatggttttgggaatcacaaatacaaccagggaaaatgctgctgtttctgtttccccagaacctgtttcccctgtaaccgtgaatccttccccaaaaactaccacagttttccatgaatctgtccctagcactggtgatgttgttagtagtccatcgtcactggccaacaacaataaaaaccatacctacaaccaaactttagatcaaactttagatcaaatagatcaaagtttttctgaaactactcccacagaagaaaaaattgatacttcagcgcctaacctgaatctagtatctaatcccgaacctgaacttcaacctttaccagaaattcctcctagtaatgtcaccccatttactccacgtagttattcttctgttgaagatactggtttgcgcttagggataggcaaaaccaagagaaaaagcgaaccagttaatttatctgatgtcattgcccaaaccgatgtccaaatagaacgcttgggctggactaaagaacagggaagagaacatctcaagaaaacctacagtaaactggggcgttctttactgagtgaggaagagttactcgattttctcaactacctcaaagctcaacctgatcctatagctggattttaaaaggaggggactggggactggggac

SEQ ID NO: 71 - DNA, 28045 bp, Sphaerospermopsis sp. LEGE 00249
  LEGE00249_87
ttgtatgtgtcaacaaattagttatgttcattggatggaagatatcatgagatgttgacattttcacccttaataggactactataactgaatatgtaaacttttgtaacgacattcaacatttctgcgctagaatataaatctgaaaaaagctgattgctttctttagggctaaaaaatttcggatataatattacttctccatcagtagaaataattgtttttttattaacgtgattttctaaaatcacattattagtatctggtagatagtcccaaagactgatttgattatacataatttgattaaatctccgtaattatacatttattgaaatcatctgctgtggttcaggatgctgattctatattaccaagtcatccccaaattcaaaacaaagccctttcctaaaaagcgaactgacaagtcagcacttgcactatcgcacatccccaaacccctaaatagcgatcgcactccctccacatcccccaaaaagcgatcgcacttccacaaaaccccaaacgcgatcgcaccccaaacacccccaaacaacgatcgcaccttccaaaccacaaaacagcgatcgcacatctccaaacgccccacaacagcgatcgcactatccaaacctgcaaacagcgatcgcacctccccacatccacaaaagcgatcgcacctccacacatcccgaacagcgattaattcggtaaactgcgaaaaatggcaacaattaaaatccaaaagctaaagtatccagcatatatttacttttttctcttcccacttctaaatatatttctagtagttcttcataagcagttgctccacccacaatattccaaaactcatttccaataacaacagcttcatcaaaaggtaaataactttttgcctgagtccatttataatcaactttatttgcaccataaggattataaggcattgcataataagtttgtaatttgggacggttcaccccacgcagtaaatgaaacctcaacaaacgttgtaaaacttctaaacattgtcctttattgggtttgggagctttgatttcaaagaaaaattccgtcccatcttttgccaaaatataaaggtcaacacgagctatttttaactctaaatcattagttctgcgagcattcagcactgctgtgatcatttcttgaaaagatggtttttcttgttcctgttttgcagcagattcgtaattttgcttttgaagttcagcttctgcaaaagctgcaatacttacctgatttttaatatcgtaaccccgccggacatctcgatgatgttcgagagcaattaaacgagcgcattcttcaaaagaattacctaattttgtacttaaacctctttcaaattgattaatacgtattagttccgggggaataagtgcagcttgaaatggctttaattctccattcgctgaatatcttgataaatactcttctgcactggtaggttttaaaattttacgtcctttatactcatctatcagacctttgataaaaccttctagataacccttgatttccgcacgagtttttgaactaatagctgccataaaatcagacttataaaataagtgttaacaatgctttagctaaattgtaaatgactggaactgaaacagcattaccaaattgatgtttggcttttgtttcattttcggcaatttgaaaatcttcgggaaatccctgtaatttggcataatcttttgcagttagtggtttatatttattcttggcataaatttcttgtataaatttttgtttatatacttctggctcatcacattgtatagatatagtagctacataatctcttgttcctgtagctgtcaaagttccaattgcatcagcatgaggtaaatatattttagaaatactattaattcctgaagatattttagaatttacaaattcataacctttaccttctataaaccgtagaatttctttctctaccaggctgttaatttcttcaatttgtaaattatcaattaaagtctctaaaacttctatttttaaaggattaccgtctttctctccatatattttctttctcctattttttaaaatagtttgacatattagtttctgtctataagtagtttctgttaaatcccaagaatgaattgttgtatgtccatctctaatatcagcaaatgtaaagaaatcatttaactcatctactttttggaatctgcctctggaagcaggtatcttaccatcattaaataaaacttctggagggaatttctttttaggaaagttagttttttcaataccagaaattatatcataaagttttaatcgtttatttaatggtttagggaaagtaaaaccccaacaattggcaagatcatttctaataccaacaataaatattctgtctctatcttgaggtaaaccaaaatcgtaggaatttaacacctgatatttaactacatagccaaatgatgttaaattagtaagtatatattctaaactttgtttatttcttggctcagttaaacctttaacattttcaaagataaatgctttaggttggttaagttcaacaactctaaacacatcaagccataatttgccccttggatcatctaaaccttgccttttacctgctattgaccaaggttgacaaggtacaccacctactattacatctatttcaaaaggtagtttgtttaaattggtaatatctcctaaatatggttcatctgcattgtgatcacgaataaaattatttttgtaaactttaatagcttctttatcaatttctgaatatcctaaacaaattcctcctagttcttctagtgggattctaaagccaccaataccagaaaataggtctacaaatgtaaattttgttgtgcaatttataggtgttataggttgaaataattgaaataaatctaattgtttagcttcaacacttgtactcatatttttggttcatgttatctattatttagctaacctagtatgactgattaaggcaggtataaaacctgcccatctaaacctattctataccctcaatccgattttcaacctcctgatacaactccctcaaccggtctaaattctcctcactcgtctcccaataaccgcgaccattgacttccaacaaagtagaaacaatcttgcggaaagaatgaggattcaaattcatcagacgtttctgcatttcctcatctttaataaacgtctcattggtttcctcataaacccagttatccacagcaccagcagttgcactccaaccagtggtattaaccaaccgcttagaaagttcccgcacaccttcataaccgtgagacaacatcccctcataccatttggggtttaacaacttcgtccgcgcatccaaacgcacagtttccgataaacttcttacctgtgcattcgcggtagttgtatctgcaatgtaagatgcaggtttcttaccatccgcacgcagacttgcaactaattttgtggggtcagagtcgaaataatgggaaacatcagttaaactgatttccgaagaatcaagattttggaaagttgcatcagcagttttcaaagttgtttcaaaaatctgccgtgactcatccattacccctgggttatcagaattgaaagagaaagatttgcgtttcaaatacatttcttgcaattccgcttcactatcccaagtgctattctccacagctaggttaatattagaagaataagaaccagaagcattagaaaatacacgggttgcagcttgacggagattaattcccatttcctccgcttgttgcagtgcgtgtttccgcacaaagttcatttctaagggttcatcagcttcagcagccatttttacaccctgatccagtaaattcatctggttaatgaacaggtcgcggaagacaccagaacagttaattaccacgtcaattctaggacgacccaattcttccaagggtatcaattctaacttgttcacccgtcctaaagaatcgggaacaggacgtactcccaccatccacataatttgtgccagggattccccgtaggttttgatgttatctgtaccccagaggacacaggcgatggtttccggccagtttccaccattttcagtcttattgcgttctaacagcctatcaacgacgattttcgcagactgtaccgccgcagtagtgggaatagattggggatctaaagcgtgtatatttttacctgtgggcaatacgtcaggattacggatggggtcgccaccgggtcctggtaaaatatattcaccttctaaaccttgcaataaaccgccaagttcgttatctgcacatacttgttttaagcaaaattccaaatactcaaacaagggttttaatgcagatgtatccacgttgttaaaacctgactgatacagagattctacccaaggttcttttttacccatgttaaagaagtttaacttggatactaaggaaactcgaccttcggcatcaatttgttcttgtactaaagctgccacagccgcacgggtagccattgtaatgtcttgtaataattgcacatcggctaaaatgcctttgtcgctgttgcggtagatttcttcaatgttccggcctaagctgttagcaatgatggagggtaatcccagtataccgtcctcttgccgatctaaactggcaatattcactaaagtggcgatcgcctcttctgcacttggtggtttaccgatgatatgcaaaccgcaaggtaataagcgagattcaatttccattaacttgcgataaacaatcccgacgatattatcccgttcttcagaggacatatcttttgcgtcggtttccggcaggtcaatatctttatctaagttaacaatgcggcatttgtcaacgatcgcattcacaatggaaactccccggccgctgtctttcaaagtttggtaagaaccaattaactcactgagttctttcaaacctttgtataaaccagcattttccgcaggtggagttaagtaagaaattgtttctgcataactgcgacgtttagcaatagtcgcttcactggggttattcgctgcataataatacaggttgggaattgtgccaattaattgatctgggtaacaatctccagacatccccatctgtttaccaggcataaactctaatgagccatgtgtaccaaaatgtaaaacagcatcagcaccccaaattctttctaaataagtataaaaagcggcgaagccatgatgaggactagcggaacgggagaataataagcgcatggggtcgccttcatagccgaaggtgggttgcacaccgatgaagacattaccgaaatgcttaccgtatacgagcaagttttgtccatcactgtttaagtttcctggtggtggaccccagttttcttctaagcgttgggagtatggtgtcagtgcttcatattcggggactgacattttgtaagcaatgttgagttcaggacttgcgtattgcgcttgtgcgtcgtggatgacttgttccatcaactcttgggcggtttccgggatgtcccgcacatcgtaaccgttgtttctcagtcctttgagaacttcatggatagaaccaaatacatctaaatatgccgcagttcccacgtttcctttatcgggggggaagctgaaaacggtgatggcgacttttttgattaatttgggtttgcgacgcagactagcccattttaaggcacgttgagcaacaatttctacccggtcttggagggcgatcgctctacctgttgccccatctttaccggataggataataggctcaattgctccatctagttcaggtatagcaatctgtaaagccacttgaataggatgtaaccccaaatcgctatctaaccattcttcggtggtttggaacaccaaaggcaaggctaccatgtaaggacggtttaatttttttaatgcttcaatagctttgggatggtcttgtcttgcaggtccacccactaaagcaaaaccagtcagggagacaaccgcatcaactaaaggtaatctggttgtaggttcgtagaaataagcatctacaggtttagagaaatccaaaccaccagcaaacacagggagaacttttgcacctaatgattctaattcctggacaattgctacataatgtgcatcatctccagtaactaggtgagttcgttgtaaaaccaaacctacacatggtgcgaggggatctttgatatttcgagaaatgtctctgcggacagaataccagtttagatattctcgtacatcttcaaacatatttggcgctaaaggatgccaaatacccatgtcgggataaactactggtgcttgatattcagcagcagctagtttttgtttatcttccccttttaagacgtatttatcagccagcatcagcaagaagttttccaggttttctgctgaaccacctaaccaatactgaaaactcagcatgaagttacgcgcatcttgcgctttttcaatggggaggaatttcagcacttggggaagagtacgcaagagcttcaacattccatcttggaaaccagcgccagatttctctttacgcttcttcatgaagttggcaatgacgctcttagattgtcccaactgtgccaaggagaagctacccattttattaaggcgcataacttcaggcatggaggggaacacaaccgctacatcgaagttatcccggtggggttcgactgctgcgacgagtttctgcgctaagtcttcaataaatatcagggaagcgatgaatatattagcactagctatatcgcgtttaaaatcttcatagttttccgagtcgcgcagttcctcaattaagtaaccactaatttcaatggccacgctgggatggttggcgttaatttcccgtactgcttgagataaagaactttgatattgagactcaagcacaacataaacgactttaatcagattgcgtccgcgtaggtcgtcaggtgcaatatgtctaattgtggacttgacctgggtgaacattcagataagctcctttgaggcgtgttctctactggaagtgcatttcttccattttcttcggcaattaagagttttgtaccagaaaactctgtgtcagtgggggttttctccctgaactgaaacaaaatgatataaaaaacgtaatcattattgataaatcttaacaatttagcaaggttttctcagatgtttgtaatttctatttacataaatagttagttatttaactatatggttgtttaattggtgtgggggctggtataggaatgaaccacgaaggcacgaaggacacgaaggaagaagaggaatgaaccgcagaggcgcaaagaacgcagaggtaagaaggtttttgtgtacatcgttattttctctgttaaataatctatataaaaaaaattaaattaatcgtatataatatgatatgagatagttaaaattacagccttatttttcaatgaggatatgaccatgaatgctttaactgtcaatttagaatcagtaatagaaatgactgatgagcagttttttcagctatgtcaaaacaaccgggaattaagatttgaaagaaatgcaaatggagagttaataattatgccaccaacgggaggagaaacgggaaatcgtaatgcgggtattactgctcaactgtggatttggaatgagcaaaataaggagggtgtagtttttgattcttctacttgttttaagttaccaaatggtgctgatcgttctcctgatgcttcttggataaagttagaaatatgggatgctttaactgatgaggaaaaacaaaagtttccccccatttgtcctgattttgtaattgagttactttctcctagtgatagtttgaagactacacaagaaaagatgagggaatatatagataatggtgtgcgtttgggtatattaattaatcgtaaatctcgtcaggtggaaatttatagacctggtaaggaggttgaggttttggaatctcccgctacggtttcgggggaagatgttttaaagggttttgttttgaatttggggatgatttggtaaaattatataggtatttatttaaccaggtaagtaggtggacatgaaataaccaaaatgtgtaacgatatgtaaattcatctcaatgcattattgtggttgagttttagccatttcacaaaacgaaatatattttgattttcctccgcccacctacttaaaagctatgaggaatttaattcaagtagataggataccttgaattttttgatcttaatataattgttattcatcctgtgactaaaaaaatagaaatacgttctgattctccagaattagataaaatgctgcgtatctcagaatatcaaaaatttaacggtttagtattaccatcttatgaagaatttggggtatgtccagactatgaatatctcaaatggcgatatgacaattatggaaaacttataaaaaaacatatcaatgtagaagactattttacgttagaagatgatggtttcatgttctaaattaaatttatcaatggaagatgatcaaccagatccccgacttctgaaaataactaataattaatatgtataatcaaataagaagtcggggatcttaaaaccagtttataatcctcttccttcgcttccttcgtgtcttcgtggttcattatttcttaaactaggaactttacagattaatcaataatcaagaattggtttgtgggaaattgggattttttttgtctgaatcaggatgtccaggattaaaggatttacaggatattatttaatgatagtttgtaggaatttggggattattcttgtttatctttattcagacaattacaacattcaccaccaacaaacaaccgataaattacatcctgtacatcctcaaatcctggatatcctgattcagacagtaacctataatctttgatatggttggactgtgattaaaccaggaataaccgcataatgcttaacattaatgtatgtaatggcaaaccgaaagcgattgatgtttgaccaattaaagcatcaattaatcccaaattatgactaagatgataatttgcaaatacttctaatgcttgatcacaagtttcaggtgttgcccaaattacttcaacattattaataaatttccgaatttcctgcaattccaacttattcttacatccttgcatcaattccattgctacataaccaggtaaagcaatttcttcatctcctaaagaacttaaccaaataattgcaggtggatatttacgcagaaagtcaatcacaatatcactatctaggagaatcataatctctcctttgggactgttcacgtaactgacgagcgtaaacaagactatctggaatatcgtcccttttttcccataaacctatcaaactcgaatcaagtaactcacgagcagttaatatttttttctttacagatagaggagatgacaatacaattacttctacaattgttccctctggtaactcagttgtaggtaattcaattttgccatttttaccaacggttgctttttgtttaattccagtaatcatgggttgtttttatttccttgttgatttttattataacatctatattacagcgatttctatttaagtgaggtacaagtagtaataattgtagcttgcttcccgaagggtacgcagataaacgcagataattttctacttcgttaaattggaaaaccatagtgttatcaagtacaaatatatacatgattaattttgctgtatttcacctttagcaagtcttaaattgttgtaagctttgtcattaaacaacacaggagtatcacttttctgaaaaagtctgaaaaagttagacactgtgttttaaataacctagcacatttacaagtaaagcggtatcaggcagatccccgacttctttaagaagtcggggatcttaaacccagcttataatcttcttccttcgcttccttcgtgtcttcgtggttcattatttcttaaacatggttggtaggaaattgagttttttttgtttatgattattcagaataatacaacattcactatcaacaaataaccaaaaaattacatcctgtacatcctcaaatcctggacatcctgaatttttacattgaatctaaataacgccgtaatttactactaataacatcaattactgttactactaccaatagcactaacatcatggttgtagctttgttgtattcaaaaccatctatataactttttaactgaaaacctattcctcctgcaccaactacaccgagtacggaagcagcacggatattgtactcaaacatccacaaagtatagcctaatcccaagggtaaaacttggggtattattccatattgaactacttgaattcttgatgcaccaattacctgtaaagattctaaagaacgagcatctacagcttcaatggcttgttgataaaatttagcaagataaccaatagtgtagatggataaagctaacgttcctgcgggagcgcctaaaccggtagctgctacaaatattaaaccgagaataattgagggaacagaacgcacggcattttgcagtaaatttgctaaccaacgtaaccataagggagcgatattattagcactggcgatcgctattggtagggaaataatagcaccaagagaagttccccataaggacatttgcacggtttcaattaatcctttaattgctatatctaccactttccaatctggtggaaataagcgactaataaaatctataatataaggccagctatcttttaatagtgcagagtctacttttaaaccttgcaaagcccaaatataagctactaccattactaatacaatcactatattaattagccaagagtaatggtgaagaaatttagaattaaaggattttttcatttttttcatgactcgtaattttgatttgagaatataaaaataaaatcaataataatgtaagttgctgattgggcaatttgtcagaatcaggatgtctggttactgagcgaagtcgaagtacaggatttaaggatttacaggattaaaacaaaaatgttatcagcaaaaattaaacattaattataaagttattggtgtgaatctagatttttacacacttgtaacatgagaaaatttttcttgcaagttatcacattttccgtcataaactacacgacccgcatctaaaactatagctctgtgggcgtattctgcggctatgcctaaatcatgtaatactgtgataatagttaagccttgatctgtgttgaggtgagataaagtttgcattacttgttgggatgcaactacatctaaaccggtgataggttcatcagctaaaagtatttgtggtgattgaattaaagcacgggcgatcgccactctttgttgttgtccaccgctcagttgacccgttttttgatacatttgctcccttaaacctaattgtcctaataattctcttgccaaaaggcgatcgcgttgaggaaaaccaaataaagtttgtctagttgttctcacacccaaacgaccacacaaaacattttcaatagctgataattgccgaattaaaccaccaccttgaaacaacatcccaatttcccggcgaattttcggcaatgtttggggagtaatttgtaaaccactaatgtgaatttctcctttttccaatggtactaaacctaccagcgatcgcaataatgtagacttacctgcaccattcaaacccaacaaaaccacaaattcaccttgttcaatctcaagattaatattgttgaggataggacgatttaaagatgtagaataagccgtttctaaattatgacattcgatctgtttcacgctggtaattgataatagctaattggatataaggagaaatttttataggggtttagcataatgcttacccctaattacagcagattgcagatcaatgagctacagaatctcaattgaaccttatgtacaaggccagttttactcctgactcctgacttctgctgtaattatggttccattcccaaagttttcaaggcttcgcggacagatttgagatgacgattatgatcgactctcactaactctgtagaattatacaagctcttgagcatttcgttattttctggtctatttaacttgagtagggcgttaatgattttttcccgaacatctgctcgaatatcatcatcaaaaacaactccgtgagcaggaacaccagaaattttatgcagcacacgtaacttagacctgtcttcattggaaatataaggggggtacatggcatattctgatactacagccacatccgcttgaccacgcactacagcttctaaagctttactgtaattaccgccgtaggcaatttgaccaaagaacccttccatacggtctttatcaggtacaaaaccgtttttcaccaactcactcacagggaacataaaacctgaaccagaagtaggagaagtaaacgccattcttttaccccgtagctgttccagagttgctttcgcagtatttctggtttgcagagggctatttttgggaacaacaaatatggagttgtaagtaaatctcccggaataattgtcacgaacttccgctaagtgcaagcgtgcatttgctaattgttcagccttcaaagctggacgactactcaagaaagccacatcagcacggttggctcgtaaagcttccactgcggctgtatcatcagctaactgcgctcttacaggcattcccaattctttagacaagaatttggctaccttgttagccttttcttgcaaatcaggtgcatcctttcgagtaggaaaaactattgttaaagtttgggaacttctttgggcaagtaagcgtggtgcttgttggttgagatttgggttagctacaacttcttgcattccgcccaaggtgctaactaaaccagcgagggctgcaaatgccccactagcagctaataagccctttttagtcacacccactttattgctattcattagtaaattttctcagtatttttgcaaataactttcaactaatctggtaaatcaatttaaaacttttaggaataaaagtcaataagctagatgaaaattatttccaatatttatttgcaaaatttactaaattacatcttgttgtgattttgtgtaaatcattgtgtttaatagtgtttaaataaaagttattaaattacgacaagttataaagtatgcaatattgaaccactcccaatactgctcggttaagcctgaaaagtgattatatggtgtggtaggttgggttgaggaacgaaacccaacattatcaaggattttgttgggtttcgctatcgctcaaaccaacctacatttccttaaccgacaagtattggaaccactccaagcacggataacagagaaaatttattggtaaaactgaataaatctgtgatgatgaaacaattaaattaaaagttgtcaggtgggttaggaacgtaacccaccattaatatttaaccctctgcaatattttgattatttaaccaaataaccaaatcattaacactagtaaaatccaacaaagctaaacctagattttccacatcttccacagataacttattaatttttacctgtaaatcttgattaatttcaccaaagcgatgtttaagtagacgcattaccgtatttaaaattacttcatggcggatttcttgataacatctggtattttttaaatcactcatattaaacattcttactaactcctgggaattaagaagaggtaatttataggaaacaataaaataattttgttgtagggtgagttagccaaaacctaacccaccgttgatttttaaccatctgcaatattctgattatttaaccaaataaccaaatcattaacactggtaaaatccaacaaagctaaacctagattttccaaatcttccacagataacttattaatttttacctgtaaatcttgattaattcctcctacgcgcctttccagtaaacgcattaccagatttaacgcctcttcatagcggacttcttgataatatctagtgttttttaaatcactcatagtaaacattcttgctaactcctggggactaagaaggggtaatttataggaaactattgtctgaattaaatctagcaaatttctttgttgacgggtatcaggtaaatctgattttgcttgtgataataaagttctcgctaaagctggaactgctttttctttttccaccactaacttaatgatacctaatcccaaggatgtttgtacatctacccattcatccaaatataaccgagttaccaaaggactttccaataaatagcgatagggttctatttctgtgggttctatactacgtttagcaaataaaaccacagcttgccagggtgtagtggaagcatagagatgtaaataaagaaagatttccgaaaaaaagcgagaataaaaatcctcatctctttgaaattgcacctctacaaaataaatcgttctttttggttgattatctttaggtacaaatacaccatcaattctaaaagctgtttgtttgagttctacagaagcaaaatcataagcatttgcttcactagggggtaaattaatcagttcaaaaaaagattgaggtaaggtttgaaaaatgcgataaaagatagaatctgttttcatgaatattgggattaaatatttttgtaaatgttgattggggaagaactatgaaatatgatacaatagtaaacaagcaaaatattatattaattccaattaattacatcaagattgtggataacctaaaaatcatattgggaaattaacttgaattagtgatataatgacatagaggaattattgacaaccaaaatatgttaaaatacctaacaattacagaagcacaagagcaacttttagatttaccagatgatttacaacaagaaccaataatcatcaccaaacatggtaaaccagtaatggcggccattagttttgagcaatatgaatctttgctagaaacattagcaattttatctgataaagaatttacccagcaactacaagaaagtatagctcaagccgacaggggagaaactattagttggaatgatgcaaaacttaaactcggactttgataaaccacaatctgatcagattgaatttgaaattcagttaacacctttagcattggagatgttagggaatattaaagataaacgtcaccagaaagctttgagttcacggattgataaattaaaaatagaacctgaaaaacagggaaaacctttaacgggacagttgattaattatcgcagtgttagggctgtgggtcaacgttaccgtatagtttatcacgtagaaaatgatcaggtcgtagttttagtagttggtgtaggtttaagaaaagaaggtgataagggagatatttataatcttttgcagaaattattgtagtttttaatatgcaattgacgaagtattcgctttacctaaccaattattacagaatttttcatatatttgaaccaaattacgccaccccataaccagtataagggcgtttatagggtggttgtaaacccagtacaatatcctcttttggtactcccatattctccaattcttgagctaaatctgcatcagtcatattttgctgaatccagattttgccatctttaatatcaaaatgaataatactataataaaccctttttaaaccattccatcccacatacattaactgatagtgatcatggaaagtatcaaaaatcaattcattatctatttcttcatagttaggtttaaattgaccatgtttattaagaatagtttgaatacattgacgatagtgttctaaagttgccatttgacaattacctccataatcggatcatatactactattttaacttgatgacgttgtactgcaatacgcgcaaggcgagattgaaaaaaggtttcgtatacatctacaggaacagccaagtataatagacctctccaaaatagaatgtattgatttttaatatattgtaggggcgaagcatttgggcgataatttgacggaaaaatcagacatctagatatcccaaatgcttcgacctgcccccataaataggttccataatttcttttctggagaagtctaataaacgttcaggttctttttcttcaagtgcaatttgataattaagaaactgacctaatgctgtataaaaatcactcactggtgagttagtagcaaaacttttgatttccacagcaatcttttcacccgctttttctgctgctattaacctttctgcacctaaatcaattttcagttttacttcctcaaattgaatttccaaaggatcattagtaataatccaatcttccttttctagtgcatttcttactgattcatgaaataaatctctggctgacattattggaaaataggttttgacttatataaataacttaccacattgttattcttatccttcttactttgcgtctttgcgcgaaactcaaaaaaataaactccccctccatcacaaaacgaagggggacaaaaacctaagcagtgaaatacttagctacagaatgataagcaataatcgccgtcgtagactgttcaggatataactgttcactttcatccatatacatcttcatcctatcagtccccaacaactccaactgcttaaactgatcctgaatattcggacaagcaggataaccgaaactataccgagaaccttgataacgctgtgccaaaatatcccgaatattatccggttcagcatcaccaaaacccaactcccggcggattttcgcgtgagtccattctgccaaagcttccgcaacctgcaccgccattccatgaaaatacagataatcagtgtattgattatcagcaaataatttttgtgcaaactccgtagcaacttcccccacagtcaccgcttgcatggggaaaacatcaattattcccgactccttcggtgcaaagaaatctgcaatgcaatatcttctcccagaacgttgacggggaaactcaaaactagcaatttgttgagattgattttccacatcatatatatgtagagaattttcctcagactgacaaggaaaatacccataaatcacttgaggatgcaacaaattctcctcaataattcgcgctttccaactttctaaaatcgggtaaaccttctcacttaaaaacccttgatattcctccttagattgttccttcggcttacggaattgccattgtccagcaatcaaagcttgcaaatctaaataccagaataattcctctaaagaaatatcatcaggttgtaataattgcgttccccaaaaaggaggagtgggacgttcaatgttaatttctacagcttcagaacgccttgtatctatctcccttggttcagcaggtgctttcacagattttgcaactttttctttaacttcatgggtagattcttcagttcctacctcatccaaaaacccttttaaatcatcccaatttcctgcggcttttgctggcattaacttatccataaaagtcaaatcagaaaaagcatccttgccataaacaactttacccttataggtattttggcaatcttcatttacgaatttaggagttaacgccgcaccacctaaaattacaggaacagtaattcccttttcattgaaaacctgcaaattctccttcatgaaagcggtggattttactaacaaaccactcatggcaatacaatcaggtttatgttcttgataagcctgaatgatgttttcaactggttgtttaatccctaaattaatcaccttataaccattgttagataagatgatatcaaccaagtttttaccaatatcatggacatcacctttaacagtggcaatcacaaaagttcccttagcattattaccagcttccgatttttccatgaagggttctaaataagccaccgccgctttcatggtttctgctgattgtaatacaaaaggtagctgcatttgtccagaaccgaacaattcccctaccactttcattccatctaagagaaaagtattgatgatttccaaaggtggatattgttctaaagctgtagctaattgtttttctaaaccaattctttcaccgtcaataatatgacgttttaaacgttcttcaattggtagactttcatcaacgcctgtattacgtttggttttgactcctgcaaaaattgttgtcaattctcccaaaggatcataaacgcaaacatcaccatcaaatttgcgttcatcatatattaattgccgacaaacttcttgatgttggggttcaattttcgctaggggtaaaattttactcgcgctaacaattgctgcatccattcccgcattcatcgcttcgtgtaaaaacattgagttcaacaccatacgcgctgctggatttaagccaaaggatatattagatacacccaaaattacatgacacccaggtaattcttgacgaatgcggcgaattgactctatagtggcttttccgttttcccggtcttcttcaatccctgtagaaatcggtaaagctaaagtatcaaaaaatatctctgtcgctggaataccatactctacagcttgacggtaagcacgttgggcaatttgaaactttttatctgcggttcgtgccatgccatcttcgtcaattgtaccaatgacgacaccagcaccatactttttcgctaattccaacacctttaaaaatcggggttcgccgtcttcatagttggtagaattgagtaaacacttacctccggcaacttttaaccccgcttccattttttcccattcggtggaatcgagcattaaaggtaaagtaacattattaacaatgcgagaaactaactcgtgcatatcacgcacgccatcccgtcccacatagtcaacattcacatctaaaatgtgtgcgccttctttaacttgacttctggccatagacaccaaaccatcccagtcttcagcgttcagtaagtcacggcattttttagaaccactggcgttaagacgttcaccgacgatcaagaaagaattatcttgatcatagttttgagtggtataaattgaagctgctgctggttctaaacttggttgtctaacctttggttttaagtccttggcaatttccgctaattgttgaatgtgtgctggtcgtgtcccacagcaacccccaatcacttggacacccaaatcttcaacaaagtgcatcaacgccatacgtaattctacaggcgtaagtttgtaatgagcttgaccaccaacattttccggtaaaccggcattgggaatacaggaaactacgaaaggagaatgttctgataaatacttgatgtgtggtttcatcaagtctggaccagtggcgcagtttaaaccgagaatatcaatggaatatggttctaaaatagttaaaacggcagcaatttccgtaccgaccaacattgtccccatactttccattgtcacggaaaccattaatggctttctttcgccttttttcgtaaaaatttcctcaactccgtttaatgcggctttaatttgcagaacatcttggcaagtttcaacgatgaataaatccacaccaccatcaagcaaagcctctgcttgttcggcaaaagcagctttcatggtatcaaaatcaatatgtcccaaagtgggaagtttggtagtcggacccattgaacctgcaacaaagcggggtttttccggggtagaaaattccgcagccacacttttagctagttctgcggctttcttactgagataataggcttggtctgctagatcgtattctgctaaaacaatagaagtaccaccaaaggtatcagtttcaatcacatctgcacccgcagcgaggaagtcacgatgaactttagccactgcttctggcttagtatggactaagtattcattacaaccttcataatgtgcgccgccgaaatcttcagcagtgaggttttgggtttgcaggttagttcccattgcaccatcaaagacaatgacaggaagttctggactatgtaagcgttggagaaatgaatgtgtcatattttatgaaagaaaattgtgtgtagtctgataagatgcaacctaatttactattttccaagattttgatgttttaggcagggtttacagaaaagaatatgttaaaaaatcaagaagcaggttttatccgcttacaaacagatgtatttagggttaaattattggcaagcatcaatgatgtgatcttggagaaacagcgcatcctcttggtaaaaggggaggaagatgtggctgctattattccagttaatgaatttgaacgtctggaatggatcacttatgatatcaaatatggacaatttatgatagatgaagaatataattatgaggatgagtgtggcagaccatgtattaatatcaaggaattagaatggaattttgagcaaatacttgagcgggtaatatgcaataatgaaacctttgggttaacttttcctacagctgcttttgaagatgatcttgagaattttcttccaggggcaattttgatgaatattcataaattttggattccagattattggctgattaagtgaaagttaagtttattttattaaattagtttagcaaacaatttatgagatttagagactgggcgactagggtaatactaatttttctgatgctggcaactttgattttagccatgtttattggtggtgcaagaaaacagccaaataatacaggaatatcaaatccaaatcctattatttggaatcaatatccacaagctttatatcaatcagaaaaaatagcagaaaaaccgccaatcactttacctaagttaccaattttctctaagtcttttgttgagagaaaaccaaaaaatcaagttattactcaatacataactactgctgcttttgctgaatataaacctaatttagctgctgctaaagtacatcctagtaattatggtgaaagatttactcatgatgttaatggtgtacctgtaaataatcaaccgctgattgttttacatgaaacgactaattctgcttctagtgcagtgaatttttttcaaaataataatgttgatgaaaatgtccaagctagttatcatgctttaattactctggatgggactgttatttatttagtagcacctgataaaagggcttttggtgctggtaattcggtttttaaagctgctaatggtgtggaggaaactgtacaaactaatcctaatttatctccatctgtcaataatttcgcttatcatgtttctttagaaacccctcctgatgcttggggaaaaagaaatattcaaggacatagcggttatactgaagatcaatataattctttagcttggttaattgcccaaagtcaagttcctgatgagagaattactactcatcgtgatgttgatattgctaatggtaaggttgatcctttgagttttgattttgagaagttttttaataagttgcattcttttagagaattgaagagttttaataatgcgaaaaggtgatatatgaggagtcaggaatctgtaggggtttagcagtgaaacccatcacccgactgggaattaattctcagtctcatagcaaaagtcatctaaagatgactgaaaataaccatatttgattattagtcatgaaatatggctaacgtcaagctttggtatcatttaatggcaggtgtggaagctaacaaataagccatctgtaacctaaaatgactcgcaaactctaattgattctgaatcatgtattttatatcctgaatcctttcataatgagaatactttatgcgtcgagatactatcttttataaattgtttcaacaatctcctacattattgtttgaactattgacaaatccaccagaaaatgcagatacttacagatttgattcggtagctgttaaagaacctaaatttgaaatagatggggtgtttttaccaccagaaaatgatattcctggggttgtatatttctgtgaagtgcaatttcaaaaagatgaaaaactgtatgaaagggtatttgcggaatctttactatatttctaccgtaactgtgatagatttagtgattggcaagcagtgattatttatccatcgcgcagcacagaacaaagcaaaatttatccctatcggggtttgcttaacagtgagcaagtgcatcgagtatatttggatgaattaggtgatattcgtcagttacctctatgggttgcactgatggtattaactacgctggaagaagaacaagcaccagaagcagcaaggtatttattaacaagaacccgtgaagaagttactcaaccatcaagtcgcgtcataatagaaatgatcacgacaattatggtttacaagtttgaacaactaagcagagttgaggtagagtctatgctgggaataacgctcaaggaaactagagtttaccaagaaattaaggaagaaggaagagaagaggggagagaggaaggaagagaggaaggaagagaggaaggaagagaggaaggaagggaggaagcaactattgatctaattattcgactattaaccaagcgatttggcgaaatatctcagaaaacacgctcttcaatttctagtttacctttacctgtgcttgaagagttgagtgaggcattgttagattttactagcttagatgatttgcaaaattggttagaagtgcgaataaacaaatagctccagttattaaaccagagctattttgaagatacagtaaattttacttactaaaactataaatttgctgtgtctccaagcgatcgctcaataatgaaggtttaatttctttcccaaaaacctgccgatctaactgtacttgtaaattactcaaaggatcactaccagcagaaatcagaaattctaacttctgcacatagggtaaatctagtaaattatccaaaatttgccctatcgcttgcaagtaaggatgtcctttttgttgataccaattagcatcagcaacatttggctgatcaaatcccaaatgcacagttaatgatggttgatcaaataaagcaattcctaaaggtcgcgcttcttcctgtaacaataaatgattatcttttgctaaatgtctgattttctctaaacgttcataacgtttggtgacagattccggttcatcttcccagtctaatgctactgtcaccagataagtttgtaacaacatatgtcccagtttcttagcttttgtagctagataacgggaattgaaatcattagattctatcagcaaaggtacacgatctacaacttccaaaccatagcctttcacacccgcaattttacggggattattagtaatgaggcgaatttttttaacacccaaatccatgagaatttgcgcccccatgccataatctcgcaaatccgcaggaaaacctaaacgctcgtttgcttctaccgtatccagtcccatatcctgcaaagaataggctttaagcttgttaatcaaacctataccccggccttcttgacgcaggtaaactacgacaccttgacccgcattttcaatcattttcaatgcggctttcaactgcattctacaatcacaacgcaaagaccccaaagcatcacctgttaaacattctgagtgcatccgcaccattacaggttcatcaccgaaatttgccggatcacccttgacaattgccacatgatctgtattgtccaaggtgtgacggtagccgtaaatattaaattgtccaaactgggtaggtaatttagtgacaatttctcgataaatcaggcgatcattttgcagacgataactaattaaatccgcaatactgataatttttagtttatggactttggcatattcaactagctgttgtaatcttgccattgaaccatcaggattttgaatttcacaaatcaccccagcagggtataatcctgctagtcgcgctaaatcaactgccgcttctgtgtgtcctgcacgcttcagcacacccccagctttagcccgaatcgggaaaatatgcccaggacggcgcaaatcttcgggttttgtagcagggttgagagttatctgaatggtacgcgctcgatcttcagcagagatccccgtactgactcctaaatggggacctgcatcaatgctgacggtaaaagcggtttggttagtatctgtgatgttgctgaccatgaggggaaggtcaagttcatccaggcgatcgcctgtcatcgctaaacaaatcaaacccctagcttccaccgccataaaattaatcatatccggggtggcaaactgggcagcacaaattagatcaccttcattttcgcggttttcgtcatctaccaccacaatagaacgaccggctttaaggtcagctaaagcggcatcaatagaatcaaatttaaaggtttggttattattggactgtgacacaggaaattctagctaccaacgtaaatttttttaacaatttcttattttagattgtagcctgtttatcgaaactagagattctgtacaatgatttctgtctattcagtctgacaaatagcaaccatgtaaataatattacaagtagtacaggtataaaaggatgttttaaaagtcgctaatggtgtatcaaacagaactaaagtaggggtaattcatgaattaccccctacgtcagaatccggtttttagtccaatcttacgtaagtcctaaatctaaaatctcaatctaacatctctaaaatatcctctgattccaactttttaattatgagtttaattatgagtcaagaaaatttacaagcaagcagagaatggtggtcacaaagatggctagatttattggattcctatcgctttaaaaagcggttagaaagggcgagaaattattctcgacaaggcaatgttttgagtattgaatttaaaggtgcgaaggttttagcacgggttcaaggtagtgaagtagaaccttataaagtttctttgttcctagatgcttttagtgatgaagaatggggttatgtgattgaaaccatgtcccaaaagtcaatttttgctgctaagttattagcgggagaaatgccacaaaatattgaagatgtctttacaagtaacggactttcattatttccttttaccttgggtgatgttcatagtaaatgttcctgtcctgataaagcagtaccttgtaaacatattggggcagtgtattatcaattaggcgatcgctttagtgaagatccttttgttttatttcaattacgaggacgcaccagagaaaaaatcattagtgatttacgaaatttacgcagcagtaaacttttacaaaagttggcagatcagtcggaggaaaagactagcaaacaggaaaaagcagaaattcaaaaaccaatttcggaacatcaatattcattaaaatcagataatttttggcaatataatgagccattagaatcgtctttagtggtaatttctcctagtgtgggtgagacagtgttagacgttttgggtaaaattcccctagctaaagatgaggaaaatttagtgacttcttctgcgggtgatgtgacaatgaattatttacaatccgtttataaagatgtgagtcaaaaggcttttttagcagccatgaacaattgacaattgacaattgataattgataattatttcattcaaggttaaaaaccttccattttaagaggaaatgcgatcatgccagatgaagaagtttatacaacagatgttgatttagacttcggtaaaccagatgcacctttaccaaaagagataaaagagattaaaattatgactcgtgaagttatccgtaccgataaagcacccgcaccagttggaccttataaccaagctattgtagcttcagggaaaatgctgtttgtcgctggccaaatagctattgatccccgtttgggtgatgtggtttatactgatgatgtcaccaaacaaacggaacaggtgatgagaaatattgaagctatcctcacagaagctggtgctacttttaatgatgtagtaaaaactggtgtatttttagctgatatgaaagattttgctgctgtaaatgcggtttatgcaaagtatttttctgaagataccgcccctgcgcgtgcttgtgtggaggtttcccgtttacctaaagatgtgttggtagaaattgaatgtattgctgtgattagttaacagatttttctcaagtatactattagcgggcaagatgcccgcaccacaagagttttattttataatttggtgggtgttggctaccctacttttagttttctggttcgatacctgctgcacgtagttgtgctgctagtctttcagcacgctgtttttcttgttcagcacgttgtttttctacttctatctcctgtcgtttttgttctactaattcggaactccacaataacaaatttccttgttcatcccaaaatcttaaccatttagtggtgagattttctcttgtaccttcccaaataccgagataaagtttgatttcttctatccagtaacgttggttttgatcaggtgtttctatttggtattgttcactatttttatctaagcgataaacttctaagtctcctctatctggttcaaaaataatgtagttaggaacttttaaaattctttcataaaaaaaccattttccaggcggataagttggtttactagaatattctgttccatcggtatcagaaataaattccatgacaataaccggaatgtctccctgtagttggggggtataactacgaaagacttcttgcttagttgtgcgaatttcggggatataagcccagtcaggggctttaacgacaattttaccgtttactgtggcacagatgccataattcgtagttatgaggcaattggcagcaagtttacctgctagttggaggctttcggttagggcagcggcttgggtgggttggtagatgttatccactggatcgtcgggaaggatgtaatcatcgggtaatttttcccaagtgatttgatagtcttgggtggtgatgatcatggtggtttttcctgttttcaggtttatcaatgattatatcaaatcatctcattacccaagttgctagttgaggctggtaattggtaattggtaattggtaattggtaattggtaattggtgatgaaatccctgtttttatcctgtaaatcctcaaatcctggacatcctgattctgacagtttcctattacattaattcatcaggattaatgcctaactcacgcaatttttccgctaatttttcggcttttattttcgctgtatttgcttcttgtttagcagtagcaacttcttctgacggttcgggaattaattccccagctaatctaaaccaccttaaccaaagtttaggaataccgcgaaatgttccttcccataatcctaaacttaaacctaattcgggcatgggtaaacgtccatcaataaaatttacaggttcataatgaccacctgctaattgaaaggcgcggacttcgttggtataacgactaaaaacaatataatagggaatccgcaaaatgcgttcataaacttcccattttgtggggggtttatctgtttgactttctttagttcctaaatcttcctcttctgttcccggtgataataattcaactactacaaaagggtttgctggttcttgccaggtgacataacttaaacgtaaatcttgattattatatagtttgggaactccaaccacaccaaaccaatctggacgtttataccataaaggatgttgtagatcataataaagatttaaatcagccgcactataaaccaattctggattccagtttagtggttgaaaagttaaatatagcagtaaaggttgtaaaaaatgaaagtcgtctggcaagcctttttcctctggattttcgctaggtaaatcatacattgtgggtagggtttcccaagggggaaggggtggttctgtttg

SEQ ID NO: 72 - DNA, 27845 bp, Sphaerospermopsis sp. LEGE 00249
  LEGE00249_88
ccctgctccctgccccctgccctctgccttctgcctcctcaagagtacggtaattgcgctggcactatgagcgacaaccacactggatttttgctattctttgctaatttaggatcatcatcctgtttccgggcattagaccaggcaaacagtaaatctcaacatcttagaaaaaaacataacttaactttacctaaatttttacaggaggctggtagatggctgcaaccgattttaaagactattactcaattttaggaattactaaaactgccactccagaagaaattaaacaagcttttcgtaaattagcccgcaaataccatcccgatgttaaccccggtaataaacaagcagaagcaaaatttaaagaagttaacgaagcttacgaagttctctctgactccgataaacgcaaaaagtatgatcaatacggtcaatattggcggcaggtaggagaaggtggtttccctggtggatcaggggtagatatgagcggttttgactttggtcaatacggcagttttaatgatttcattaatgatttatttggtggtgcaggaccacgcaccaacaaacaaagttattcctatcgtacctctacaggtaaaccaggtacaggttttggcggttttaatgattttggttttcaagatatgggcggtgctgctgcccaagatagtgaatatactattagtctcacttttgctgaaggattcgcaggagtgcaaaaacggtttagtctaggtaatgaaactatagatgttcgtattcccgcaggtgcaaaaaccggtactcgcttgcgggtgcggggtaaaggtcaagttaaccatagcactcaacaacggggagatttatatttaaaggtggaactgcaaccccattcttttttccaatttgaaggtgatcatctcgtttgtgaagtaccaataactcctgatgaagctgctttaggtgcttccattgatgttcctactcctgatggtagtgtaaatgtcaagttacctgcgggagtgcgttctggtcaatctctgcgtttgcgtggtaagggttggcctttagctaaaggtggacgtggtgatcaatttgtgaaagttgcgatcgcaccccccaaagacctcaccccacaggagcgagaatattatgaaaaactccgctctattcgtacctacaacccccgtagtcatttggcacaggtgaaattgtaaggagtcaggagtcaggagtcgtaggggcgaagcattgggaaaacaaccttggacaaaaattaataatttatcccaccttccgcaccctaaactgtcacacaacgaaaaatggtcatttggggatttgagattggcgaactgcttgcagcagcgcttcgctatcgctacctaaactttagaccattttgtattaaaattatcctcaaaggtcttcaaaaatccgaaattaccgattgtgacactggggggtgcggaatgtgggctaaatatttcttcactacccaatttttgatccatatccctaactttttccataagtcagagatattagcttgctatcccattcttttgattaacaacttgtaataatttgccatcatctccggtgtcgcttgggtagcttgccatgctggacgtgcaactaggcgatcgcaccaagcagtcaattttggataatcgttgaaggaaatacctgtttttggcaaccaaggtatgagtgttcccgctacaacatcacctaaagttagattattgctgccaaagaatggacggtaatcaagtagattctcaaaaaacttcaatgctgtattaacttttatcttcgcttgctcaattgcttctggattttttcctggtaaatcgaacattactgacatcagcggctccctggctggtaatatttcattgacacaaatgtgttgcaccatttgcacaattgctaaatctttggcatcttttggtaacattggtgggtttggatatttagcttctaaataatccaaaatcgccaaggactccaccatagtcaaaccgtcatctaccaaaactggaatatgatggaaagggttaatcgctaaaaattctggtttaaactgctcgtcgttgatcagtttaacttctaccaattcaaattttaatcctttttctattagtgtaatccaaactcggcgtgggtttacatgaattggcgaataataaagtgttatcatgggaaaaagttatacctgtatttatcgctgtattgggttttattatacacgccttatcgtcaaagattttgaatactaagctgttacacagctaaattgtataatcctaatattctgaactcttgtttaacaggcaagatgcctgttccacttatacaaattaaatgcacaacagcttataacgaaaatttacatacagcagggaaaaaggaacaggaaataagggtttcagtatgtactgggtcttgttcaataatcaaataactaggagtcgtatatattgattttattcaaatctccttaatttctatttccagcatacttttctagcaatgtctctacactagcgttatgatctaagaatgaaaataaatgtctgtagattaattttccatctttatctaatacaaactgcgctggtaagggcgctcctaatgcttgccctgtgtgatatgttctaaaaatatgacaactaggatttattaataagggcatttttaatcctaagtctcttactactgcttgactttggtgtttatctgtgctggtgatcattaaaatttctataccccgttttgtaaattcctcataattttcatttaatgctttaatatgaggataacaaaaaggacaatattgtttttctgtaaaaattcttgtaaatgctaaaataacaggctgttgaccacgataatctgataatttgattgtacgattattggtaacatctgttaatttaaagtcaggtgttaatattcccaatcttaaatcatcgagtgctggtttgggtaacaaattgcggaaaaatcgctcgttcaataaacctgtaaaatctgtagatgtcaacataaataattaaaagttaaaagttaaaagttaaaaattaagaatgggtaatgggtaatgggtaatgggtaatgggtaattcaattttggattttggattttggattttggattgtatttgatgaactccaatctaaaatctaaaatctaaaatctaaaattttcttcaccaatcaccaatcaccaatcacctacactgctgcgaagtaaactttagacttcacaggatcgggaaccattgttttttctccgggttgccaaccagcaggacaaacttcgtctgggtgagattaaacgtgctgaatagcctgtaatgtacgcaatgtttcatctacactgcgaccaaatgctaagttattaatggtagaatgttgaattacaccatctttatcaatgataaataaaccacgcaaagcaataccagctgctggatcgagaacgttatagtctgcgctaatttctttcttgatgtcggaaactaggggataatttaagtcacccacacccccagatttacgatctgtttgaatccaagcgaggtgagaaaattcactatctacagaaacacctaagatttctgtattaagattcttgaattcttcgtagcgatcgctgaatgctgtgatctcggtggggcaaacaaaggtaaagtctaaggggtagaaaaacaggactacatacttgccgcgatagtcagaaagtttgatggtcttaaattcttgatctgctacagctgttgctgtaaaatcgggagcctgttgaccaacacgaagacatccattattgagtgacatttaacctagttctccttgagttttatatccattttttggcgtgggtatctgggttagatcaaccattcctccacgctcatcacagtttagttacaatctgttacgactatatcatagtcattacgattttgagaacagttgatagttaatagttgatagttaagagtttttaccaatgacccattaccaattaccaactacccattacccgctaccaatttaaaagccaatgtttgatttagatacaagagaatggttactaactaatggcttaggtggttttgccagtggtacagttgcggatgtgcatacacggacttatcatggttggttatttgcggctacaaatccaccttcagacagaaaattactactttcccatttagaagcaagtttagaaatcccaggaaaagttatagcactgggaacaaatctttggggtacgggtaaaattgaaccaacaggatataaatttttacaacagtttgatcataacccagttcccaaatgggtttggagtggggataattggcagttatctaggcgtttggtaatgccaaattggggactggggacacttcgacaagctcagtgcatcgctggggactggggactagaaggggatagggtaaaggtctgtagcaataatcaaagagttttgattgaatatcggtatgaggggaaagaggaagggattttaaggttaaggttgtttataggcgatcgcaattttcaccatcaacaaataggtaacaaaaaaatccagttttcccaattactccatcaaaatatactgtgtttacaaatgaataactgggataacttttgtggtaactttggtacaccttggcatttacgatggacccagggaaaatatcaagtagatgggttatggtattggaattatagtttaccagcagaaacaaaaagaggattaggcgatcgccaagatttatatagtcctggttatttaaccgtaaacttgcaaccaggagatacagtcaccctagaagctaaagtaggtttccccgactcccaagaaaatttttcacctgatagttttacagaagcagtagtaacagaacaagcaagaatagcgcagatttttgggtggggaaatgaggagacgggaaaatggggtgaaaattcttccttaacactttcttctttactgtcacctgttacctgtcacctatcacctattcaaaaacaactactcaaagctagtgatcaatttatagtttatcgtgattccatagcaggtcctacggtaattgcaggatatcattggtttaatgattggggaagagatacattaattgctttaccaggattaacattagtaacaggacgttttgaaattgctaaaggactgttaaaaacctttgggagttactgtcgtcatggactcataccgaatacttttcctgatgtagataacgaaccattttataatagtattgatgctgctttatggtggattgaaattttaggactttatttagaaactactcaagattggcaatttttgttagaacaatttcctattgtgcagcaaattcataaagcttttgtcagcggtactcgttataatattcaagttgatgctattgatggtttagtgtcttgggatgctcaagatgtagcgttaacttggatggatgcactggtagaaggaatacctgtaacaccacgttgcggtaaagcagtagaaatcaatgctttatggtattctgctttatgttggttaagtaaatggtcagaacatttaagtcatgaatatatagatcattctagtcgtttaatcagtcaaaaacaacgttatcaacaacaagcagaactggtaaaaatatccttacaaaaattttggcatccccagttaggttatttatatgatctcattgatttagaggatagtcgtaattcccaaattcgccccaatgctattttagctttatctttacatcattgtgctttttctcaacagcaaggacaaaaagttttagacttagcaacttccaggttattaactccctatggtttacgcagtcttgatcctagtgatccagaatatcagggaaaatgtgaaggaagtccgcaaaaacgcgatcgcgcttatcatcaaggtacggtttggacttggttgatcggtgcttatattcgagcttgggagcgtttttatcctgaaacacccttaccttttgactggaaaccgttgttagatcatttttcatctaatggttgtttaggttcaatttcggaaatttttgatggtgatgcaccccatactcctagaggtgcgatcgcacaagcttggtctgttgctgaagttatcagacattataaatgattgtctcacgcaaaggcgcaaaggcgcaaagagaaagtaagatttataggaaactctaggttaatcaagttatagatacaaattataagccgttgtgcatttaatttgtataagtggaacaggcattttgcctgttcaacaagagttcagaatattaggattatacaatttagctgtgtaacagcttagtcgcgttgatacaccattccaaaatcatcccgattatcctgatacttatcatcaacaatttcagattttacaaactgcattaaataacatcaaattagatcccaatcatcaaagtaaaggagttgttgttattggagaaccaggaacagggaaaactcatttaatgatgcgacttacccatgaaagattaacaagcaaccgattattatttattcggcaacctaataattctcaatctatcccctgtgagccttaataccctccccgcttgcagggaggggagacaaagcacagctttggcggggttgggttcttccggtttaatgatcagcaatcaagctgacacgatattagcccatgacttgtatcatgctgccatatcaccacaagacttttatggctacagcacgctacgcaaacagcaaaccctattgaggggatgctgaataaatgtaaaacctagaaaattgcctattgcctcttgccttctgctacaatttcggattttgttgacacattctgaccaccggagagcgttgatttggatttctttttagccaactttctgccgtagcaaatagcaataaacccagtgatattcataaataaaccataaaccgctgctggtattcccatatcagggctgttaagaagtcccagagcaattgtgaaggctaatgtagtgttttgaaaacctacttcaatggcaatgcagactttttgaggatgattgagttttaaaaggttactaagcagaaaacctagagacattgaaattgtatttaacaagataacaccaattccaacttgtagaataaagccagggagactttcccactcacgaataattaacagcagaatgatgattgctaagaatgctcctgcgacacggttagttactttttccaaagaaatggcaaatttaggaaacttctgccgtagtaacatccccaaacctataggacaaagtatcatcagaaaaatttgcagtattgtttttccaatgggtagagcgagggttgcattttgtcctataaaatgctgatatgcaaggtttcctaacaccggaattgtaaatactgtaatcaaactgctaaaagcggtgagagtgactgaaagtgcaacatcacctttagcgaggaatgtaattatattggaggaaactcctcctggacatattgccactatcattaaccccattgcgatcgcaggttgcatgggtacaactttagcaatgataaaaccaataataggtaacaaaattaattgactgaacaaaccaatagcgactgctttgggatattttgttactcgttggaaatcttcagggacaagagataatcccatccctaacataatgatcgctaaggatagaggtagaacaactgaacttaaaaaacttgcttgcatatctgtatttaattaaacaattaatgaaaacaataattagtatttcatgttttataaacatttgtcaatcaataatgaatcaaaaaatacagattttcaaattgataactaataaagttaatgtaattgttacaaacttcattttgcatgcttatgtgttatcattttcagaggcgatcgctaatgaattagaaggtacaggtgtcactgtcaccgcactttgtcctggtcctactgcatccaaatttcaaaaatccgcagcaatggaagaatcaaaaatttctcatgttaatagaatgatgacaactgaaagtgtggctaaaattggttatgatagtttaatggcaaataaaactattactattcccggaattagaaatcaaatattagctagatccgtgagatttgcacctagaaatatagttaccaaaattgtcagaagtatgcacgaattgaggaaataatttcagaatttaggagtcaggagtcagaatattgacttgcattacaaataattttactgttcctcttttaacaaccaaaaaccgctaaaagtcatccctgaatcatcaggttgtaccaataaaaaatgcaaacctttacttaattgtttgcgttgttgataaacttttgctgctgctgtaacttctgcatcttcaaaagttgctaaaatccatctatctgctaaacctgcttctaaaattaacccatcaggtgaaccaggaatataatttaaactcacagggttagtttcttgtaaccatcttactaaacgcagagattgtctaccaccataaattatcacaccgggaataggaacagttgaagctaaacctaaattaattggttgtagaaattctggtatttgtaaaacaggaatcggacgatctgcaaattcatcaataatatcaccagcttgaatatttgcaaaacgccattcttcaccccagagattttctggtaatggtgttggtggtggtttatcaataactaaggaatattgcttttcttgcaaccattgttttaacgcttgagtgcgacgggtagcttcaatttcaatttctaaattattcgctgctgctgtaattaaacttaaagcttgaggacgaaaaacttgaattaaatcaggtaatttttccttagctgctagtttaaaatgttctgttaaccaatttgaatttgcttgtgactggggacaggtagcgatatattcaaagtgacgacttggatcacaaatcaataaatcccataatatctgtcctgctgtatctttttggggactgcgataaaaatcaacttgccaaattagactcatgattactattgatgttttttgttgtcaatttaatttttaccataaaacggggtgtagtggaaaatttaccatcggtaagcaggagagtaatcatcagtcattggtttttaatactttagatattttaatactttagatataagttggttaatttttcctattcctatgagtattaagtgatagatctcccctttgtacttgatacgtaattgttaaaatcataagttttaattgaccatcactgtagttaaatcatactactttttgaagtgcggaatgtgggtcttaatgttgacacacaaaaaaggtttggtggttaaccaaacctcgctataaatccagtgcataacaacatcccaaagtaatttaacctgtctggttttgtggctgcatcttcccagaggatgtatgcaaatatgcgaaaaactgataatagatgatccggttgccaaaaattcagttattaccccaaataaaaaaggacgggggttatcccgtccgcactaatagcttgaaagtggcaatacaccttggaatataaaaaaaatagtagaaataacattcaataggttgtcaggattgtcaatgacatcaacaataaaaacggtaatttaaaccgtgtaaattgtttgattcatagattaatctctgcaactttgattaatctagcacaattaatttttgagtttctgccaaaatggcaaatattacaatgacaaaagagacgggttttaacccgtccacggtataataattaaaaacatcttggtaatttctgtaatatatcaggttactttagtggatgattgccaaaatgccaaatcccacattccgcacccacaactgtcacaccccaaggaaatggatgtatttagtacataggaactaattgctgagaagatttgttaaagcttaataggaattattactatttagatagagatacagttaacaaatacaactaagtataaaattattggttcttaggttattttgatagaaaactgagttcaaaatcattgaaaagtttatcctcaattacgatgaaaaaactaaaaaaatgtgttgactcaacagaaaaatgagaaaattgaaatagatactttggtggagtttctgttgtcatgtttaatgtaaaagaccttgatttgaagaagatagaccatttagggatagtagaaataattaataatttactaggatcagaaccagaagaaaaagtcagtgcaggtcaggtagtaaaggcgatgattttaaacggtttaagcatgatgtcacagcctttatatatgttcccaaaattctttgaattaatcgcttgtgaacacttaattggtgcaggagcaaaaccagaatatttcaatgatgataagcatattttaattggactatttagctcattaatcaaattaatgttctgaaattttcatggcgtttttaactttatttttagataagcataagttaaaatcatgtattgagattatcaggataaaattatattattaaaattctctactaaaccactcttatatttattgctccttattgagaatacatctaataacttttcctatccaaaatctattttttttgagccaaaggtgattttatactccttttttataaatcattttccgtaataaccgattgtgacagttaagggtgcggaatgtcggatttactggtgctgattcttggtgtttgtaggttgtttcaggtggtttaattaggaggaaattgagggataattttggattttggattggatgtttaaggtcggtctaaaatccaaaattagtttaaatcaatcaaggagagttggttaattcctcaattaattggtcaggagtaagaattcgcggtgtaactacggggaaatcttgagaattacgggtaataatcgcatctaattgattaactacagcagtggagtattgaatggcatcttcaaaatctttaaaattggttgtgaaagccattgtaattgcagcctgatttaccgtggcaatttgacagaaagtaactaactgatttaaataggtaagcgtccaatctcgacctctggctttacggatgatataatacaaatcactaaaagttgaagctgaaatagaacctgcaattttcccttgttcaatcagtgataaaacttgttcacttgtattccaaaaaggctctctttctagggcattatcaatgataatattagtatctagcaggattttcacaggttatatttctcctttaaatattcatatttagcttgttctggatcaaagtctgctggaacgggtggggcattttcaaataaaccctcaaatgcttttatcttagattttctctttggtgtttctggtgctggttcacttgctggggttgtagtattatcaagcgtctcagtagcttgccaaactacaatttctacatctccaggaggtaaattcagggggtcggtaattactaatttaccagatgaatcaatttttcctttgagtttgtatgcttgcatgatgtttttcactagaagatgtttctatattatctcgtattccctcaaagtaaatatataaaaaattgcaagtgtcaaagaaattatagtcttttatcttttggtgctgtttcaagaatttttttcagtattatatctgatgcaagacggatatctcttatggatgcttcttggatagacgcatatctaactgaaagttttaagccttttttattggactcttctataacctctttgtattcacctatggtaaataaatatatatctttctgaatttccttaaattcttttatacttttagtgtagattaacaaaagggctaaatatttttttgcttcaaccaaggactcttctattttatctttgttttcttcaatatcaaaataaagagttaatactgttaagagatttttaatacaaccagaataaatatccctgatgtgcagggtaagagcatctcaatcaggcttgacataagggcttttcggaatctaatgtagagtcaatgaaacaagaacgtatctctatctaaatagtaataattcctattaagctttaacaaatcttctcagcaattagttcctatgtactaaatacatccatttccttggggtgtgacagttgtgggtgcggaatgtggtccaaatagctggtgattgatgatcggtgattggtaattggaaactagcgtaatatccagatacccgacttctgtcaaaagtcgggtatctagcttttcaaccttttatgtttaattatgttgatctacttaccagtttgcttttaaagcaaaaattttctcaatgatatcttctacaactttatcaggtgtagaagctccagaggtgacaccaacaactatttctccttccggtagccagttttctgctattgtcaattctccagttaattgccgatgttcgatggcgttagctgagagaatacgctcaacgctatcaatgtgataggaaggaatattgcggtcaaaagctatctgttgtaattgtgtagtatttgaagaattaaatccaccaattactactattaaatctaaattgtgttcgactaattccaacatggcatcttgtctttcttgggtagcgtcgcagatggtgttgaaactttggaaatgttgatttaatgcagcgggtccatatttctgcatcatggttttctcaaagagtttaccaattttttcggtgtcacctttgagcatggtggtttggttggcaatacccactttttctaaatctttgtcagggtcaaatccagcagaacaagctttagcaaacttggttaaaaattcctcacggttgccaccattgaggatatagttagccacatattcggcttcttgtaaattcaaaacaatcagatatttacctgcaaaggaactggtagcaacggtttcttcgtgtttgtatttaccgtgaataattgaggtaaattcgccttttttgtgtttttcaactgtgttccaaactttggaaacccaaggacaagttgtatcaacaatttggcaacctttatcatgtaaaatttgcatttcttggacgctggcaccaaaggcgggcagaatgactacatcaccttgatcgacaacagaaaagtcctttttattagcttcaacaggaataaattggacttccatttcttgcatccgtttgttcacagaaggattgtgaattatttcgttggtgatccagatgcgttctgtggggaagtgctgacgagtttcataggccattgctacggcacgttctacaccccagcaaaatccaaatgcttgtgctagtcggatagtaacattacctctttgaaggatgtagttgcgatcgcgtatctcttgaattaagctactttcatactcagactgcaactgagtggacacttctgctttatgtccaaatcctttccgattgtaattttctgaatgttggaggctgcgtttaaaagctttggtatccattttgtgttgtctgctaaaatcaatatttcttattttctcttgccaagacacaattcagttaatgtggtgattggtgattgggaaagaagggaatagggaatagggaatagggaacagggaatagaagggaataggcaataggcaaaagctaatattgtccccttgcaccctgccccctgcacccctgctttcttcactgtcacctgtcacctgttccctattccctgttcattgtaaatctgcaatgcagtgcgccagactgtgtaaccttggggattaaggtgtaaaccgtcggtgctaaattctcgacgcagatcaccttgcttgtcagtgaacaagggatgtaagttgacatatttaattctttgttgattcgctattttttctagttcctcatttaacttgcgaatacgactgttaggaatagctaatagtttttcccgtccttcccaagttgcttcttctcccccatgtggcaaaatcgactgtagaacaattttggctttggggtgctttttccgtagataacggatgatttgtttttgattggctaaaatttcttcatcacctacgccgcgaatcatgtcattaatgccaatcatgattaaaatgacttctggtttggtacggtcaaataactctaatctttttaataatccttcgctagtttcaccagaaattccctgatttaaccaatttttgccttctggcaataaatcaggtggaaaccataaacttaaagagtctccagctaatatggttaatttttctggcggtttttcggctgctactttggcttcttgtttaagaatttttagccattgttgataatttagtttatgacgtggtcctaactctggtatgaaagcttggttttgagggttgaggttgactggttgtgggggagtgctagttgcaaaggcagtggtcaatttctgctgtcgccaaatcagtaaaatgatggctaacatcaggataccatttgtcaccagtaagaaaaatccccagattggaaatggttttgcggaagtggacacgattaaaaaattaaaaattcaaaatttaaccttgaaaatttattctgtggtcagttaatgccgagtaagttcaatttacatcaagtttacaaaaatttagtaattttgcttttgaatcttaaatgataaagtccccaaattctttaagaagctggggatctcacggacttgcaaataaaaaataaccaattgttgagtaaacaggggtggtggaatgatggggagatggggaagattaatagcccagtcaccagtcaccaatcaccaatcacctatcacctatcacctatcactataaacgttaatgcgatcgccaaactcggagttataaccttcttctccgtgttcgtggatatctaaaccttggttttctgcttcctcttttacacgcagaccaatggtagcatcaataaatttgaggatgatccatgtaccagcagccgcgatgatataagctatggcgatcgctgccaattctacaaatatttccccaaaattaccacgtaatagcccatctttcccgcttgggttgacttcggtactagcaaagatggcggttaaaattgctcctaatgttccacccacaccatgtacaggataggtgtctaaggcatcatctacattcaatttgtgcttgaagcttacagcataaaagcaaacaagagaagtaataaaacctattaatattgctgctaagggtgtgacaaatcctgcggcgggagtaataccaactaaaccggctactgcacctgtagcagcacctacggcggtgggttttcctctcagggttgcttctaaaattagccacattaacgcacctgcggcggctgatgtgttggtagcaacgaaggctactgtggcaatactacccgcagataaggcgctaccagcgttaaagccaaaccagccaaaccaaagtaagccagcacccaataaaatgaaggggacgttatggggtggactgagacgatctgggtggtttttccgaggtccgagaactatggctgctaccagtgcagaaactcctgaactaatatgtactactgtgccaccagcaaaatcaagagcgcctaaaccaccgtataagcccaaaaatccaccttttgcccagactgcatgggctaggggtgtgtagataaaggttgaccacaatagcacaaataagcaataagcgcggaaactcatccgttcggcgatcgccccagaaattaaggctggagtaataattgcaaacatggcttgataaatcatgtatgcttgatggggtattgttcccgcataagaaactatttcttccggggctgaaccttgcaaatatccgcttgtttctaaaccgacaccgtttaaccctaaccactgtaagccaccgatgaagggtaaaccaggagcaaaggacaaactataaccccacaaaacccaggtgactccgacaatggccatcaacacaaaactcatcattaaggtgttgaggatattgcgcgatcgcacaaagccaccataaaaaaatgctaatccaggtgtcatcaacaataccagtgccgatgagatcagcacaaatgccgtatctccagtatcaggagcagttggtgtatttgttccttgggctaaggcattacccatgagtgggaatactaacaaacatagggttaaaaccccaatcatcacaaatttcttcaacacttgtttttgttcctatgcaccgaattacctcacattacttatttaagtaacgttttttttgatactatctatgttgtgaaagttactcaaatttccttttgggagaaccttaacaaaaaaaataatattcattttagtttctaatcgtaaacatagaaatttacttatgtattatttgcatagtttaatgtaaaaatttgcattatatatataatatatataagacttagacaagatttacataagcacaagtatcagtaataatttatactatatacaaagtagtaattcataattacgaattacgaggcagcatcccaattttcaaaaaataaccacagcaacactaaaaatctcttaaactctcttaactttgtgtcctttgcgccctttgcggttcaatcatattaagtcttggggcatattatttccatagataaaaataaatttacacatttggaatgctgccaattacgaattacgaattacgaattattaatgacttcaaatcttgaataactgaggtagcagactgatagcgatcgccaaaatgataacaaaccattttatctaaaatccttgctaattcatcgctaacattagttctgtttcgccacataatattaccagtttcaggatttgctggtagttcttggggaggtatacctgtaatagcttgaatcccaatcatacctaaagcataaatatcactacataagcggggatgaccggcaaattgttctggtggtgaataacctcttgtgccgatagcaacagtagctaattccgtttctccttctattcgtggttgaattaatttgacagcaccaaaatctattaacaccaagcgattatcttgagtacgtctgataatatttgtaggtttaatatcccgatgaattacacggcgttgatggataaaaactaaaatttctaaaatttccgtcagcatatctacaacaaatttttcacttttcacacctgtttctgggggtaattcttcacttaaagtatgtccagaaatatattcttgaactaaataaaattctttattctcttcaaaagaagcaaaaaattcaggaatttgatcatgtttaccgacaactgctaaaatttccgcttccgtgttaaataatctgcgggcaacttccataaatcttgtatctctacgggcgggcattaattgtttaactacacaaataggattacctttttgttgtgtatcttctgctaaataagtacatccaaaaccaccagaagcaagggtatttaagattttataacgccctgctaaaagtaaatcatcagttttgaatgttgatatttctgaaaaatcaaagttgttaaaatccgatggcagttgtgtcgattgatccaatattaagctgatttgagcaatagcttcttgttgtttttcaacttgcagcagaatagcttgactttgtttttgagtttgataagtcgtgtaacccatgacagcaacactagtaataactaaagctaaagaaggagtaaataaaggtatccatattgcttgcaaatacaaaccagccgcaattcctacaatactaacaataataaaaaattctactattattaatagtaaaggatgtcgccattgccttgctacaatagcacctacaatagaacaaatccaaatccataaccattcataagtatctggaaagtaatatattataggtctattatcgagaactgcactaataatttggctggctatttgggcatgaataaaaacacgaggcattctcgctggttggtctgataaattgctataaggtgtatagtaaccaggatgtacactagcggcagtagttccaataattactaagcgatcttttacccaattggggttaacttgatctgtgagaacttgtgtgagagtaacttgttgggctaggttattcgggtgacggtaatttaataaaatttgatagccatcgtcatctgtatcttgataattacctgcgtctttatataagcggggaaatatagttttacctatttgtaattcttgtttttcagtaaaactatattcaataccttgtttttctaaataaataatagctaataaagcagcaaaggaaaatctagttttacattgatgatcttttgttgtataatcaacaaataataaaccacgacggataacttgatcaactgcgttatcggtcactacatcatcaaaaccgatgttatctataggaaaattggcaggtggggcaacttctgatctatcaatattacttaataaacaagtggcaataatttgatttggctttttgagattagcagctaaatttttttgttcatggcgataaatatttaacccaatgacacggggttgataagactctaatttttttagtaatttattaatagtttgatcggataaaggccatttttccctgttcagatcctcttgagtaattgtcactaataaaattctgttatcaggaggttctggagggcgcgaacgcaacatctgatcataaatgcttaactcactattttgtaaccatttgatttcacttattacccatattaaacttgtcactactagactactaaacagaataattgataggaaattagggacactaaaagttaaaggtgaacgttgatcttgcaggagaacagcacggatttttactaaaatttcattaatcactgtggaaataacctagtttgttgacactctccgggctaagaccgggtagattatacattctacgtcagaatttgcttccttcaactttcaatactgtggctgattagagatcagaacttttgtattatcaatagacctcttgtagtcattaaatctgtataacttgaaacctgttttagagacaattcatgaattgtccctaccataattttcacaagatgtgtaatatgatatcaagttctaaaagctaaaattgaaaccatgcaaatcaaactgatttccgaaaataaactgacacaggagcaagaagaacaggtttttaacctgtcagtagctatcggacgaaaaatgacccaacttcctgcggttatcaatggtgaaaccgtttctcctgtagttttattagactctaatagagaaatttctcagtttcatgctcaaattaccttagaaaacaatcagctgtatatagaagacaaaagtaccaatggtactagaatcaacggtcaaaaactacttaaagaacgtcggacgttaaaaagtggggatatactgggaataggtaattacactattaccgttatcctccagagcgatgacgatgctaccattgtatttgaaagtacgtctgtatttgaaaatacgtccacaatttttaacccccaatctgagattattcctgcatctagggtgcagaaatcaccagattctccatcaactatcatctttaatccttatacagatgctttagaacagcaaactcctaacgctctacctagtcaacccgcaggttttccttataatttcaagttttggaatgcagaaaaagtttccttagaagctattcgtcgcagtggtgttttagtcagagaaacagaatatgtggcctgtgggggaggaatgggcagttttgtttgggtggatatgttgagaattgcgggagttaaaccagaaaatattaaagttttgagtgttcaagacaaaccttataaacgctatgaaagcctactgagaaactgtcaaattccccgacataaacggattcgttctggttcagattcctgtcctgataatatttgggggtggccaggatatgctttaagagatgcttggagatccttcttttctggacaagttggttcagctttaagatttttgtggcaagttttcgccgaacctgtttatgcagatacttacacccctcgcggtaaagatgtatttggactacaatatgctgcccatcgttctatcgaggctttggcggctgtaaaagctccaggagtccgctatattgaaggaatttattccctttggcaatggttaaaatgggcattgaatcaaaagccttaattgctttcaaaaaccttaatttacattatttctaacaacacttataacagcatttctaacaacacttctaaccacacttctaacaacattatgactccaactttattcggacgctggcaaacgcgaattttgttattagcaacagagggaatgttagtttccctgcttttttatcaaggatatttaggcattgcttccaacttagtttacttttgggtcgtcttttatgtaggtttatttggcatagcttgggatatcctatacgattttctgcaaaaatatctctgggaccacgactggccaggaatatttcaactttatgcaggagttatagaaggggtatttctaggtttaataattgccaatatcggtttacctcatattcctaaaaccgaatttcacctaaccagatttatttcacattatggtttagtgtggttagcagtttacttatctgcttgggtagtcatgcggttattatttccccggtggtgttttcgcggtggcgaatggataggtaaatggccgagaatttcttagggattgatgatatatgaatgatcggcactttctcgctttcgtcacaaatttctaatactgtcatcaaaaaaataaacatttctatgaatcaccggcactttctcgcttttgtcacatcctcaatattcatagtaggattagcctctggttgtagttctgattctaccaaggcaaccctaacttccagccttcgctaatgcccctttaaaactcgctagtaaagtgtttaatgtccaagactcttttgttttaaaaggttttgatgccgttgcttattttcaacaaggaaaagccattccaggtaatagtaattttacccacaaatggcaggatgtaaattggcgattttccacagccgaaaaccgtgacttatttattaaaaatcctgaaaaatatgctcctcaatatggaggattttgtgcttgggctgtcagtagaggatatactgcacctattgatcctaatgcctggaaaattgtcaacggtaagctgtacttaaatgttaatttagacactcaaaaacgctgggaaaaagacattcctggaaatattcaaaaaggtgatcaaaattggcctggtatagccaaaaaactttgtcgttaatgagtatttagtcttactttagaaccccgacttcttaaagaagtcggggttctgggtatattagacctctccaaaatataatgtattaataatgtattaatttgtcataagttgtaggggcgaagcatttgggcgataatttaacggaaaaatcagacatctatatattccaaatgcttcgccctgcccccataaataggttccataatttcttttctggagatatctattgggtatgttatatatgttgggatcttaaaatctgatcattaggaaatgacattcaagacagtcgctacttactatttttgttagttgagcgaaaattatccttcaagtgagttacaagcagtaataattgaacgcagatggacgcagataaacgcagataattttgtacttcattagactgggaaaggctatatcacctataactacgatgttcaatgtggcaatttaaaatatctgatgtataattagatatatcttagtaaaaatcactccatgtaattgctatggaaacaataactttaagttcttatgttggtgaagatggaatattacatttagatattcctgtaaatattgttaatactgattcagaagtgttgaatgttaagattttgaggattttgtccaagttgtgcattggtattggtgataccaaatttgagcaattaatgactctattctcaatagacaatggattttacctgggtaaaacgaaaagattgtaaagttttattgcaggattcaacacttgtgatactgatttaactattactattattttaaaacctagtgatgattttcaacaggaaaataaacccaaaggaaaaggttggcctgctaatttttttgacgaaacttcaggatgtttaaaagatactcctttaactatagattctgaaggtgtttttgatgatttagaggagtttaaattgttatgaaatatttgttagacacaaatgtatgtattaaatatctaaatgaggatttgattattcgccgcaagttagaaaatacttacttagaagatattgccgtttgttcagttgtcaagttagagttattttatggtgcaatgagaagtgataatcctgatcaagtttgggaaaaagtcaagggatttttataagtatttatttctttacctttagatgatatttcagctttaaatgctggtaaaattcgggcgcagttagcaaatcttggtactcccattggttataatgatttattaattgcttctattgcattgtctcatgatttgattttggtgactcataatactaaggaatttgccagagttgaaggttggaaaatagaagattgggaaattgaagcatagaaatgtgagtaatttttggataaatgtttgatatagatgttgggtttcgttacctcaacccaacccaatactgttcggttaagagtttttgtaggttgggttaagcgatagcgcaacccaacaaaagcttataaatgttgggtttcgttcctcaacccaacctacagaattttattttttggggttaaccgaaaagtattgcaacccaacctacttgattcttagggtatgttagcgattagtaacgcacaataaaactatagaatgttcttatttattcctgtgagggtttgtttacttcttccataggagttaacattgtgacagcaatgggatttgatgaaatggttgatgaaatggttgatgtagttggagttgatggagttggacttgatgaaattggagttgatggagttggagttgatggagttgatgcttctaaatgcgatggttctggtaatatttctgcttgtacatcactgaaataagaaccgactattttatcgtagttggaaacaaccgctaagaatgctccgcttaaaatatagataggtaatggtagagataattgtttcacccagtcaaaaaattctgccaaagcaaataatacaaagaaacaggcaagccaaaccctcattttttcttcccctgcacagaaacaactatatttaactatatttaactatatttaactatatttttagattaaacagcttgcatgatgatgcaaaatagaattattagacttctccagaaaagaaattatggaacttatttatggggcagggtgaagcttatgggatatctagatgtctgatttttccgttaaattatcgcccataagcttcgcccctacaacataagctgttatgcctttaacttgaataattaatacaagcaagatgcttgtgctactgtaacttcaggttttttgattatacagtttagctgcacatcagcttattacaaattaatagattctattgtggagaggtctattggggattttgggtaaaaatcgcaatggtagcgatcgcatctaataaatgaatcgtcactgctttctcaaaaattccgctttttcaatcctctgactttaaccaaagcggtaattgtcaattcttcattgttaattgtcaattattgaaagctacccaaaccataaaccaccgtaagttgcgacagagagacatcagcaaattacagtggtttgtttgtaactaaataattcaaaaaaatgggaaaatccgaatttactacatcaactaaggtggacccgattcgcaatctaccaatcagaattgtgcatccttcattccaactaggcaggtatttttggctatgggtttcaaaacctccaattacaacttgatgaaatcaaggctaaaacacttggaagccacaacctaaccgtgattgcgatgacattagagcaggaggtacaggctctaattcagttgtttttgtttgaacttttaacctttctgtaccatgaaaataatctagcatgaatttttgactgtgtgtgatatatttactaaagttgattttctgtaatatctcgcaataattgtgaaatattgcttaaaatttagggactagggaataggaaacaaggaactttgaaaaagcgaattttttatttttccccttgcaagggaagggtttaaaccgtatggctaacgctcacggcggaagccttgaatgaaaaaattgtcaattttcaattgtcaattttcaattgatcaaggtttgcccaacttcgcaaaaatcaaataggatttctgtatactgtattcatgctgattattcccaaaaacttcctcaactcaacccaaacacctcacagcggctaccattgggacggtacaagtcgccgtttttttgaaggttggtattatcgcgttacattaccggaaattgggcaaaccttcgcttttatgtattccatcgaagatcctattggtgggaaacctgatagcggtggtgctgctcaagtcctgggtccagatgatgaatatttgtgtcgcacatttcccgatgtcaacaaattctgggcgagtcaagatgtgttagctttaggacattggggaaaaacaaacttaaaagtttctcctcgctatctcctaccccgtgactttacacaccatattcaagaaggttatcaagctacagctactttaaatcaaggcataatcaccgatcctgctacgggtaattactgccgttggcagtatgaaattaaacctgtttatgcttggggtaatcaaaatagtatccagcaatcaaccgctggctggttgtctttttcacagatttttgaaccaggttggcagattttaatggctcacggtttagctactggttggatcgattggaatggtaaaatttacgaatttaccaacgccccagcctacggggaaaaaaattggggtggtgcgtttcctcaaaaatggttttggctcaattgtaattgttttgacaacgaacccgatttagctttaactgctggtggtggcagacgtggtgtattatggtggatggaatcagtagccatgattggtatccattatcaagggcagttttatgaatttgttccctggaactcacaagtaagctggcaaattcagccttggggtaaatggcaaatgcaagccagaaattctcattatgaggtggaattaacaggaactactgatttaccaggtacacccctacgcgcacccaccagcaatggtttagcgatttgttgccgggatacgatgcaaggtaagctagacttgacactgcgaaaattcagtagttgtaaaactcaaattactttcaaagcacagagtaatctttgtggtttagaaataggtggtggtagttgggataatagttggcactctgactaaatctactgctatcattgtagatgtttgttcatttggggctgtagctcagttggatagagcggtcgcctcctaagcgacaggccgtgcgttcaagtcgcaccagtcccgtatatttacattaaactacaaagttgaacaattaatgggtcttaacccctatgataaattgtctgatataagttaggatagtgcatcgaagaaagcgatcctatttatatcgtggatacatacttttatacatagggtttgctgaaaaagtctcttcgttaaggcagggaatagggaatagggaataggcaagagtttgggtgatctgttagtaaccaattctttgaaatttcacccggaaaatgcacgcttttaggagtatacccctgaaaaatcctgcactgatttcctgattttccacctgaaacccttgatttatcaaggttttgagtttattcagcaagccctacataagcatctaccaaagcatctaagctgttgtgcctttaacttgaataattaatacaagcaagatccttgtgctactgtaacttcaggttttttaattatacagtttagctgcacatcagcttaccaagttctgatttgggtttattttgcccaaatttcctaatctacagcagttttcatctctttagaccacagtaagggcgaagcattcggacaattaattatcggtttttacctaagactatcatccgaatgctgatgcttccagcacgcttcgcgaacgcccctacattgttgacgcgaaacctaaatcaaaatgtggtttatttacctgaaaatagctgtaaatatttttgagataaaattttttagataaaattttgatgttcgcaaacacacttacacagccttgaaaaagctattgtttaaaggtaaatctttgcggtttatgtcttttatcctacccctgtttatatggtggggatacaaagaaatacaaaatcagtttgtacatccacaagcagtcttagttttgggcggttctactaaacgtttagaaagggagaagtttaccgctgaatttgccaaaaagcatcccaatataccaatatggattactggtggtagtccacctagctatacgaaagaaatctttgttaaagctggaattaatcctaagcgtttatatttagattatgaggctgttgatacagttactaattttactacgttggtagatgatttgcaagcaaggggtatcaaaagcgtttatttaattacttctgattttcatatgcgccgtgcttgtgtaattggtgagattgttttgggtagtcgaggtattgaatttaaggcggtatctgttccctcaaaaaccgcaccagaacctatcgaaaaagctatccgcgatggagttagagctatactatggctagtaactggttatacaggagcagagcaagctcaaactaaaccctaacctttattaatgagggcgttcgcgaagcgtgctggaagcatcagcattcgggcgatcaattctcaattttgaccacaggttattttcctgtaagggtgaagcattcgggcgatcaattctcaattttgatcacaggttattttcctgtaagggcgaagcattcgggcgatcaattctcaattttgatcacaggttattttcctgtcagggtgaagcattcgggcgatcaattctcaattttgatcacaggttattttcctgtaagggcgaagcattcgggcgatcaattctcaattttgatcacaggttattttcctgtcagggcgaagcattcgggcgatcaattctcaattttgatcacaggttattttcctgtcagggcgaagcattcgggcgatcaattctcaattttgatcacaggttattttcctgtcagggcgaagcattcgggcgatcaattctcaattttgatcacaggttattttcctgtcagggcgaagcattcgggcgatcaattctcaattttgatcacaggttattttcctgtcagggcgaagcattcgggcgatcaattctcaattttgatcacaggttattttcctgtcagggcgaagcattcgggcgatcaattctcaattttgatcacaggttattttcctgtcagggcgaagcatt

SEQ ID NO: 73 - DNA, 27135 bp, Sphaerospermopsis sp. LEGE 00249
  LEGE00249_89
attgtattcttccgagtcgcgctaagggagggtaatggtttgctttgccccagttgcaccattaccgcttcccgcacttctacaggttcaccacttaaactaaaagcgcgaacttcggtaatttttaccttgactatttttcccttgagttcattgatatctcctgtaaagaaagtcaggcggtttcctccggttcttcccatcacctgagttggatctttgctgttttgatcctcaactagaacttcctcaactctgccaaaataacgttgcgatcgctcggctgctttaatcgccactaaatgatttaatctttgtaggcgatcgctcttaacctcctcgcttaactgattatcccacagcgccgcaggtgtacccggacggggtgaatatgcagcagtattcaactgatcaaaaccaatatcagccaccaatttcaaagtattctcaaactgttcctctgtttccccaggaaaaccgacgatagcatctgcactaatagaagcatctggcatatacttacgaattgtatcaataatccgtcggtatttatcctgggtataaccacgtgacattgctttcaacacttcattatccccagactgaaaaggaatgtgaaaatgctcgcaaactttgggcaattccgcacaggctttaattaacctttccgtaaaataccggggatgactggtagcaaatctaattctttcaattcctggaacatcatggacataataaagtaaatctgttaaagtatgtaaatgacgaccttcaggagttgaaccgggtaaatcccgtccataagcgtcaatattttgacctaaaagggtaatttctttgtaaccttgttttcctaaagtttcaatttccgcacggatagcttctggtgtgcgagactgttccacaccccgcacattaggaactacacaataagtacaacgttcattacaaccataaatcacatttacccaagcagtcactttactatctcgccttggttgggtaatatcttctaaaatatgtacttcttccgtagcaacaacctgattaccctcaaaaaccgactctagcaaatctttgagacggttagcgtgttgtggtcccattactaaatctaactcaggaacacgacgcagtaaagattcaccttcctgttgtgccacacaaccagcaaccaccaaagttaaatcaggttctttatgcttacgctttgcctgtctacctaaataagaataaaccttttgttccgcattatctctaatcgtgcaagtattataaagaatcacattagcatcattaggatcttctgaccattcaaagcccatatcttccagaatgccagccatgcgctctgaatcggccttattcatttggcagccgaaagtagtaatgtgataacgacgggaagaagtggtcatgggaaattacgcttaattaatatcatgtatttttagtctattcaccattttatcaaaagccgtagcctttgtaggttataaaagtctgcgttatttatttctgcgttttctgcgtcatttctggactttagtcatccaaagcattgtatcatacttgttatgatacttgtcaataaatgactttatctgtattttcaagttgtgaaataaatcatgagtgattctacaaaattaaaaactattctcttagattccgtaattgcagatgtactaccacacatcgctcaaatcaacttacccaactggtggttagcaggaggggcagtacgcaataccgtatggtctaacctatttggtgaaaaatgtcaattattcatcaaagattttgatattgctttttttgatttacagggaacacgagaacaggaacaacaagtaaaatcaattctcactacacaatttcctcagtatgaatttgatattaaaaatcaagctagttttggtagatggcggacaggtagaactatatattacagtacagaagatggaattaaagattggttacacactgcaactgctgtaggtgtatctatgaatgacttaggtgaatggcgatttttcacaccttacggtttagatgatttatttgatggcattattcgacccacaccaacacatattaatgatataaatgctgaaaataaagcattaggatttatggaaaagtgtccttggctgcgtttattcgtatagtgagaatatcctgtttaaaggttcaaatcaatcaaaaataacgccgaatatcatatattttatcctttagtcaatcattcttggagtatatttatactatttctctagatagatgaggtatgggagaaataagttatatcttcaatcaagaggtattgataggatttccgtgaaaggaaactacgttgttgttaaggcttttccttgcacaattgcagcttacctattgttcaatttctctgctccatccccctctccttgcaagagacattaatgacttcaaattacccctttatagtttctaatttgtgtagaaactatgcaggggtatttttaatttctcatgactaactctgaattaatttttgaaaggtttgatcttgattaatatcatcaaaatctatatctgtagctgcatcttccttgtagctaggtttaagctcaattgctttttgcaaattctctaatgctaattcaacttctctttgtagtgcataacaagcagctttattatagtaagcacttgcatagtctggtctaatttctagtgctttatcgaaattagtaattgcttcgtcatctttgcctaatcttaccaaggtgtaaccacgtttatcccaaattttcggggagttgggttgaaattttaacgcttgatcaaaagaagcgatcgcatcttcataacgttccaattctaccaaagacaaaccacgatttaaccaagccacactatcatctggtttgatctgagtagctttatcaaaacaattgaatgcttctttgtgtttacctaaattaccacaagctacaccaatatcacaccaagcttgatgatattcagggttaattttaatggctttattgtaagacattatcgcatctttatatctttttaaacgactaagaattaaaccccgttttaaccaaacttctgcattatcaggttgaatattaacgacttgttcataaattgctaaagcatcttcataacgtttttctgaaaacaacatttccgcttctttgatatagtcatccgcagaaacttctatttgtgtgggttctggtattgtttctggtattgtttcgggtgcggtttcttgtacttgtatatttagttgtgtattttcaggttcagctataaattgaggttgaatagttgctaaatcttgtaaaatagactctttccgagtttgagcgtctaactgtaattttgcaagttgtttaacaaactcagcttctaatttttctaactgttctaacttctctaaaatgctcaatttctgttgttcaaaattactttgaatatcagcaaactgagaaataaactcatcacctgatttttctaaattctcaactatttgctgttgacgcacttccgctacattttgcaatactttgatttggttgatagactcagattctaacttttgtaaattctgtaaaatctgtgatttttgtttttgaatatcagtttgaatatcagcaaactgagaaataaactcatcacctgatttttctaaattctcaactatttgctgttgacgtaattctgccacatttggtaaaatcctaatctgctcaatagattcagattctaatttttgtaaattctgtaaaatttgtgatttttgtttctgaatatcggtttgaatatcagcaaactgagaaataaactcatcacctgatttttctaaattctcaactatttgctgttgacgcacttccgctacatttggtaaaatcctaatctgctcaatagattcagattctaatttttgtaaattctgtaaaatctgtgatttttgtttttgaatatcggtttgaatatcagcaaactgagaaataaaatcatcacctgatttttctaaattctcaactatttgctgttgacgcaattccgcaacattttgtaattctctaatttgtttaagagattcagattctaacttttgtaaattctgtaaattctgtgatttttgttgttgaatattttcctgtacatcactgtaaacatcagagaactgggaaacaaactcattacccgattttgctaaattatcaatgatttcctgttgacgaatttgagcagcattttgtaataatgatagttgctgagaaaagtcaagctgtaatttatttaaattatcaaataaaccaccttgttgattttgagcatcagtttgtaattcagcaagttgggatttaaacagattatttaattttgacaaattctcaataaaaatatctgtttgatgttgagcatcggactgaaagtgaaataactgatcagtaaaatctgagcgtgattgtgctatactttcaaaagtatcttctttttgttgtaaagtttccgattctaaaccctgaagttgagatattaactgagaacgggttgtttcaatatcattaacagcagcgtctttttgattttccactgctgacttcatttgcttaaattgagaaactaactcagcttctaattttctgacattttcaattgtaattttttgttgttgagcagataaagtgacttgttctaattgagtatttaacctaaattctaaatcgctgatattctcttgagcagattcaacttcacgttctaaagctgtgagaaattcctgttttgattttggtaaatcagataaaagaatagataaattttcctcttcaccttgaattgcggttttcagtctattaacttcctgtgttaattgctgagtgagactttgagaagttttaatcaaattttcagaatcttgactaacattaattaattgcgtttgtagtttttcaattccttgtacctgctgcattgctcgttcaacaatatcccgaattatcgcttttcttaaaaaccataaagtagcaattaaaaccacaggaaataaacttaaaatcgttaaccaaatattaagtagggtattcgtgcgagtaaaagcacgctcaaagtctgactgtacttgcttttgaaggcggttttcctgtcgcagtctggttaattcttcccgttcctgattcgataatacctgagcagtagcggatagttgcagttttccaccccaaaaccctgtagataacagtaatggtgataataaaatggcgatttttaaagctttttttgaaaaaatggggtttttgctgttcatggcactttccctatctgtaaggttgttttttgcggtggtatgtctatgatagattatcaatttagggtaactggttttcggactggttgtttgatattagcagattagggtcaaacaaggtatctctcaatcagcttggtgtttgatgaaagtgtataaaagtataggaattgtaattatagttgattaataaatatttgaggtgtgataatttttatattcccaaaaggatcaatttccaagtaacaaaaaataaaaatagggcgttgctgaatcatgggatgatttcgcccaatttagaacgaattttcaacggtttcaaacgccaattcatcccgcatttatgcaacgcgaaaaatagttgtatttttcaatttttgtgcgaaaatatatcatatttgatataattaggatatggcacaaactgataaatctctagtttggctacacggagaagttaaaactccgccatttactgaagcagcacgaatagaggctggtgtactactgagaaagttacagcaaggtgaaaatctgggaatgcctcattctcgaccaatgccaactattggatcacggtgtcacgagttaagggtcagagatgtagataagaattggagaatcatttacagaattgatgatgatgcgatattaattgtcgaagtatttaacaaaagttcaacagaaacaccagatagtgtgattgatacctgtaagaaaagattaagtaaatatgacagagattgagaggataaaattttatggataactcaaaaagagaacgtcttgaagctaaaggttggaaaattggaacagtcgcagaattcctggaattaactccagaggaagcagcgttagtagaaattaaattagctctaagtcgcagtttgaaagaacgaagacaaaatttaatgactcaggctgatttagcagctaaacttaattctagccaacctagaattgctaatgcagaaaatggagatgcttctgtttcgattgagttattgatacgtgcgatgttagctactggtgcaactccccaggatattggtcaggtaattgctagtgttacgaggtgaagtcgttttggttagcttttttcaagctaaccttaaacgctagattctatttaggaactactatcactttgagaattgatcattttcataggttgactatatcctctcagtgcgtctagtatgtttctaatttgttcaggagatgcagatggattatctatagctgctcttattacctgttcattattctccatctttcttcttaaatttatgtacaaaatgaaaatccaaataagaggaactagtaatacaacacctattaccataaatatggtacgcaaaaatacagcttgatctctttcatttgatacctctttcactaattgtttttgctcttcataatctttctgaatctgttttgccgcacctacttcttctttttgagaataaatatcgttgtttttctgctcgaagctttgttcccgtttttcaagtagcttttcgcgtctatctaaatcttgctctctcttgtttaaatcctgctctcttttgttcaaagattttattgtctctgaggcagtacgtccaccttgcaaatcgcttttgaaagtagcattttcttgaattaattgtttattttcttctcgtagttttacaacttctgcgtttgattcattgtacatttgttggaggttaggtttgctatttccttccgaagaacagcttaccaaaaatattagtatcatacttaatgtaatggcagcaaaaaatctttttacgatccctatgtttttcatatccaatactgaatttagtacaagtagtaacaattggataaattagaattttctatttagtttgagtaaatttagctaactatccaattaaattagaatacacttaaaccatattagacaacaatacctatatataatccatatcatctcaatgtcagatgattgtaaatagttataactttaattatctcatctaaacccaccaagaacctttcccccagaaccaccgtctacaaaatgacatagtagacatattgcatcaaccatgaaacgtctcatcagcataaccctattaaccaccttcctcacaccctactccgtcaccgcaaccccacccagaaacccagataaaaccgtcaactgtgaaattctcgttgtcggtggtggactttctggagttgcgacagcttacgaaagtttacttgcaggaaacaccgtttgtttaacagaaattaccgactggttaggaggacaaatttcctctcaaggtacatctgcgttagatgaaagaccaactcaaagagaaaaacaattctattctcgtggatatttagaattacgaaaccgcatacaacaaaaatatggtcaacttaaccccggtgactgttgggtaagtgactcctgttttcttccccgtgatgctcataatatcatttaccaaatgttgaaagatgcagaaaaacagggtcgaggaaaattacatttattcccaaatacggtaattaaagatttacaaattagtgcagatggtaaaattatcaatagtgcgatcgccattcaacatcaaccagcaaaaaacgccccacctttaaacacattcaccctttcccaaaccatagaagacacttatagttatcaaaattcctctcgttttaataaaaccattattcattttctaccccaacaatcaaagaaaaataataatcaatggtacgttatagatgcaagcgaaactggagaaattattgctttagctgatgtaccttatcgtttaggaattgatccactttcctatcttgaaccttcatcttctagcactacaaatgatccctattgtacccaaggttttacatatacttttgcaatggaggcaactaaagaaccacaaccccaaatcatgcccccatcttatcatcaatatgccccatattttagttatgaactatcaagattagccaattttgatttagtttttacctatcgtcgtatttggagtccccaaaaaggtaaacaaactagattcggtggtattaattttacaattcctacacctggggatatatctatgcaaaactggacttggggtaatgactaccgaccaggaacagcacaggataatttaatttatactcgtcaacaattacaagctactggtcaattacaacccggtggctggaaaggaggactaagaaccgaaaccctccgtaaaggagaggaaaaagctctggcttattattactggttagtcgcgggaactactgattctcaactcggtgcaaatgtgaaaacaccccaaccgaaaaaccgtttattaactggtataaattcaccaatgggaactgcatctggtttatcaaaatatccttatatgcgtgaaggaagacgcattattggccgtcccagttggggacaaccccaagggtttggtatttgggaagttgatatttctcgccataattatcatgatgaatattaccggaaaactctgcccgcagatatgtaccgtcagttaaaagccacactagcaggtatagaagcaatattagtaattaggggtattaggggtgaagtcagtccaaataaggcaagaaagcgtcgccgttccactattttcccggatgctgtgggtatcggtcactacgctatagactttcacccctgtatgttgaacagtccaccagaagcacctggtaatatagaacgtccgggggaaagacggggtggaggtaacgcttatccttttcaaattgccctgagagcaatgattacccaaaaaattgataatttattagtagggggtaaaagtattgctaccagtcacatagctgctgctgcttatcgggtgcattcttttgaatggtctgctggtgctgctgcgggaactgtagctagttttgcattgaaggaaaatatagcaccttatcagttagttgatgatttaccgagattagaaccaaaattacaggttttaaaaggtattttagagaaaaacggtaatcctactgcttttcctgatacttctattttcaatcaaaattgggaaaaatggcgataagtggggtaatggggagaaattatttgtattttcccagtcaccagtcacaagtcacctattctggtaaaaattccgagttgagggtttgttcgcaggtgtaaggacatatttctggaaatactttttccccaagttgagtttcccgtattgctaatgctaaaccgagttcataagctgtgagaaacatttcctctaaatagggttttagactaggactatcttctaaaagtagtttaatttgaatacgttgttctttaattgtactcaaccaactgttagtacgtttttcggcttgaaattgccattttaatagatgtcctaacaacactgctagtctatttctcaattcttgtctttcttttcttcccaaggtttccagttcttcaatgaggttcacagtatctaatgtatgccattgttgagttttgagtaaattaacttgttcttgagtccaagcatgaaagtctgttgtatataattcaaaggtgttcatttttcacctgttattagtttatatattctttattgtagtcttgcttaactgctgtcaattctcaacccaaccataaagtaaactagatatttgaagtgttttttgggaaaatgtagtttatttatggagacaagacttgcagctgtttatggaatggcctcagcaccaactgtaacaccggatcgggtgagtcaagttactcggaaaacctatcctaattataaggtgattgtcttaaatgatgatttcaatacttttcagcacgtggctgaatgtttagtgaagtatattccgggaatgtcgagcgatcgcgcttgggaactaactaaccaagtacattatgaaggacaagccatagtttgggtaggtccccaagaaccagcagaactatatcatcaacagttgcgccgcgctgggttaacaatggcacctctggaagctgcgtaaaccatcatgagtaaacccactgatggtagacttgtttggaatcattctacccaccttcccggactcattcctattttagaacggttgtgtcaacagcatggggtcactactgtcacacctgctgtaattggtagagttaaaggtcatgcgccacaaatgaaattgcgcgtgtctgtacccattcgtgggggttataaagttattgcacgccagggtaaaacagtgcaagaggtttttgttctcactcagttatcacaggatcaattggaaaatgcgatcgctgtggctatgaaaatttcatgaagatcacaaataatcaggagaggagtttaaaaagctcctcttttgatgtttgactattcttcaacttcatgtaccgcaaatttatgtaatggcaaacttaaaatacaagaaaatgttaaaaaatatgacaaagctgtagtaatttttagagtcatggttaaaccttcccaatggggtaaaaccattttctcaatgccaaaagcaagacagtaaactaaccaataactaaaactcattctcaacagcgtttcttctgttacttgtgcttcactggtttcttgtttactatcccacagcaacaacaaaccaaccatacaagctaccgcagaaacagcaactacaaactcatgacaaaagaagtttactaaacacatttgcctttattcctgtctgaatgatgtccatatcgtcattagtctaaaggcatattccttgaggttacacaaaatagttacaaactgaaataatgtaaatgattgcaacaaaaaactctcgacttgttaagatacttaacaaaatcttttggtgatgatagcaggtgacaggtgacagttttagacagtgggtaataccgtttatttatgaggctgcgctaaattttctgacctctttctttgtgttctttgtgttctttgcggttcgttagataatttagcgcatcttcatacagaattggtataagttttaatttttatctcaagtgccaggttttttagttcttaccctcaaaactcttgcattttttgaaagtcaaaatagctcaaattctttaactgttaatgttttcccatttattcagcatcccctcatgagattttttgggcttaaccgaaaaaacctcaacattcttgttcacaagcaccaatacttacccaggaactagaaccatcttgccaatgttcttttttccaaattggtgcattgtgtttaagagtatcaatagcatactgacaagctgcaaacgcctcactgcgatggggacatcccacggctactaaaacactaatttccccaatttttaaccgcccgatccgatgatatatgactactcgattcacatccggccattgactgcgaatatcagtggcaatttgataaaatatctgtaaagccatcggttcataagcttgatactctaaagctaccacagctttaccatctgtttgattacgaaccatcccactcattactactactgcaccattagctggatcatcggctttggtatatatttcctcaagaaataacggagccaaggtaatgccaaaactatcttcagctttgggtttggtcaggagacatggagttttcataactaatttttatgcaattttacgtaagtagttgttaaaaattgtcgttattataaagcgatcagctgcctactggcaatggagaacggattttcaatgactaaaaaaataccaggacaaagtgagcaagtgcatcactgggaaacacaaattaggatggtattagaagcaactggcatcagcatctggactttcgatatcccaaccaataaaattaccatatcggataatctggaaagtgtttttggtttagataaagatcattatcatcacacatatcaaactattttaaactgcattcatagccaagatcgagaattggtgaaccgcacttatcaaaaagttattgaagacggagaagcatttgaaattgaatttcgtgtagttttggctgatggtagtattcgctggttagctagtaaaggtgcagtgagaaaagacttatcaggagtacccttacaaatatgtggggtatctatggatattactaagcgtaaacaaattgagcatcaaagaataaaagaagcaatcaaaaaaagtgaagaaagatttaaaatagttgcactggctactaatgatgtgttaagggattgggatttactcaccaatcaagtatggtggaatcaatcagtacagtcactttttggttatacatccgaagaattgtatttagatgtaaattggtggcgtgaaagaatacatccagatgatagacaacgaattaattctgatttacgtgctgtaattgatagtaataaacaattttggtcgaatgaataccgctttttgcgtagagatggtacttatgcctatatttttgaccgtggttatattgttcaagaccacacaaataaaccagtgcggatgattgggttcatgatggatatgactgatcgcaaacgagccgaagcagaattacaaagacaaaacttgcgatcgcaattattcgccaatatcaccctgaaaattcggcaatctttacaaatagaggatatcctccaaaccagcgttaccgaagtacaaaagctactccaagcagatcgagtattaattttacaactgaatgggaatggttctttcctcgcagtcaaagaagctgtagttcccggtttacctgttgttctcggacagaaaattaatgatccttgtttcagtgaaaattatatccaacaatacagtcaggggcgcattagtgctattagcgacatcgagaaagcagagattcaaccctgtcatgtagaatttctgcaacaatttgcagttaaagctaaccttgtcgttcctatttttcgccaaaatcaattttggggtttgctagttgcccatcaatgtttacatacccgtcaatggactaactgggaaattggactcttgcgacaacttgcagatcaaattggtatagctttagcacaaagtttgattttagaacaagaaaccaagcaacgacaagaactagctcgttctaacgaagaactgcaacaatttgcttttattgcttctcacgatttacaagaaccactgcggaaaattaaaacatttgctgaaagattacaagtcacttgtggagaatttttaactgaacagggaagggattatttacaacgaatgcaaaatgcagccttgagaatggaaacattaattgaaggcttattgacactttcacgagtcacaactagagcgcagccttatgtagcagtaaatttaacacaaattgcccaagaagtattatctgatttagaagtaagtatccagcaaactagaggacaaattgaaataggggaattacctattattcaaggtgatcctttacaaatgcgtcaattactgcaaaatctcattggtaatgccctcaagtttcatcgtccaaatcaaccacccgtgatcaaaatatatggtcaatttttcaacaatgatcttgatgatttatccgttggtaacacctattatcaaattattgttgaagataatggtattggttttccagaaaaatatcttgaccgcattttcaatgtttttcaaaggttgcatagtcgcagtgaatacgaaggtacgggcatcggtttagctatctgtcgcaaaattactgaacgccatcacggtactattacagcaaaaagtcaaccaggacaaggagcaaaatttattattaccttaccaattaattctcatctctaatttttcctcccagagatggattactactacaccccaaaatgatgttaattgtacaaatgtgggcagcattcaacccagggcagtcagtcctcagcaagcggctgaaaaatacaactgaatgcttaggaataattgaataattaattaatacttgtaatgagtaaaaaggagacattaggagtgaaagatcggcaaccaaaagtcaccattttaatggctgatgacgacgatgatgatagcttattagttcatgatgctttgctagaaagccgattgcctatcaaactacatatcgtcagggatggtgaagaattgatggattatttatctcatcgtggcttgtatactgatgtgaataaagcaccgcgaccaggtttaattttcctggatttaaatatgcccaaaaaacatggattagaggtactaaaagaacttaaaaatcacccccaacaccggatcattcccgttatagtcatgacaagttctaacacagaagaagatatatataatacatacaatttaggagcaaattcctttattcaaaaacctggaaatttcacatccttagttgaggtgatgaaaactataggaaaatactggtttgaaattgtagaactgcccctataagcagtaagaggcgatcatgaatgacagactcattaaagttttgttaattgatgatgatgaagatgattatattctaactcgtgattggtttcgggaatttcaagtaactggttgtgagttagaatgggtggaaagttatcaattagctagggaagcgatcgctcgacaccaacatgatatctatttagtagattattgtttaggggcggataatggtttagacttgttgagtgaagctattaataatggttgtaattgtccttttattttacttacaggtcaaggagatcgagaaatagatttggaagctatgaaaaccggagcagccgattatttagaaaaaagtcaattaactgcacctttattagaacgttcaatccgctacgcccttgaacgcaaacaaacagaacacaaaattcgccaacaagcagctttacttgatgtcgctacagacgctatctttgtaggtgatttagatgacaaaattttattttggaacaaagccgctgaacatctatatggttggagtcaagaagaagccctgacaaaaaaaatccagcatctttgtccagaaaaaattttttctcaaatttcagaagcattaaaaatactccttaaacatggttcttgggaaggagaactggagcaaattagcaaatgtggtaaaacaataatcgttgctagtcgttggactttagtacccgcatttggaaacaagccccaatctattttagttgttaacactgatattacccaaaaaaagcaattagaacagcaatttctccgcacccaaagactagaaagtataggcactttagctagtggtattgcccatgatttaaataatgtcctcgcacctattttaatgacagcgcaaattttggaaactcaagtgaaggacgaacgcgctcgacgactaatacctatattaattagcaatgctaaacgcggtgcaaatttagttaaacaagtattatcttttgctaagggaatggatggcgatcgcactcttttacaactcaaacatttactcattgaaattcagcaaattattcaagaaacatttcctaaaaacatggaagttatcacccaaattccccaaaatctttggactgtatctggtgatgctactcaattacatcaagtgttaatgaatttatgtgttaatgcccgtgatgctatgcccaacggtggtacattaacaatcactgccgaaaatcttttagttgatgaaaattacgcccaaatccacattgatgctcaagctaaaccttatgttgttattactgtgactgatacaggaattggtattaaatctacgatgatagaccggatatttgaaccattttttactaccaaagaatttggacaaggtactggtttaggtctttctacagtattgggaattgtcaaaagtcatggtggttttatcaatgtttatagtgaagaaaaaaaaggcagtcaatttaaaatctatttaccagcacaagatacaaccgaaattatagaagaaactgaaatatctttaccgcaaggtaatggagaaatgatcttagttgtcgatgatgaatctgctatttgtgaaattacaaaaacatcacttgaaagctataattatcaagtaattactgcccgtgatggtattgaagctattgccttatatgtagaacatcgtgatcaaatagccttagttttaactgatatattcatgccatcaatggatggactcaccagcatccgtaccctgaaaaaaattaatcccaatatcaaaattattgctgttagcggactagctcccagcgataaagttaacgcagtttatgatatgggtgtaaaagcttttttgtgcaaaccttttacagcaactcaattattacaaactattagcgcagttaacagttaatagctaataggtaatagctaatatttatctttctcctgactcctcactcctgactccttgaactcctatttcaattaccaattaactccactgcatcccttccatcctcatcttgtaaataaactttcacaatttcttccttagcagtaggcaattttttacccacaaaatcaggatgaataggtaattcccgatgacccctatctactaatacagccaaacgaatcacctctggtctaccatactcattaaccgcatttaaagccgcacgaattgtcctacctttgaaaatgacatcatctaccaaaacaacagttttccccgtcaagtcaaaaggtatctcggttttcgctggagttcttaaaccaattttatctaaatcatcacgatagaatgtaatatctaatgctcccacatccacactgataccttcaagagtttctatttgacgtgccaataaattggctaacggcacacctctagtatgaatacccaaaagtaccaattgtgacaaatctcgcgtccgttccaccatttgagacgcgagacgggttaaagtacgacgcagttcttcagatgagagaatttcaactactttggtagacatggtgattggtgattggtgattggtgattggtgattggtgattggtgattgggaagaaataaattctaaattttaaattcaatatacctattccctattccctattccctattccctattcataaaattaaaaatattcctacccccaaccacagtaaaaacgaatatcgagttaattgtaaagcttgggaaatcgaagttggggtaatgggataaatagcatctcccaagagtggtttatgtttagctactccacgataccagtttatacctcccatctgcacacctaaaatagcagcataagcgcactcgctccaaccagaattaggacttggatcttgaatagcatcccgacgacaaatacgccaaacatataaaggtttaattgataaaaatcccaaagtcatcactgttaaccgacaaggaaaccaagttaaacagtcttctaacttagcactgaaccaaccaatataagtataaggtgcttctcgataacctaccattgaatctaaggtactactggctttatatgctagtgctaaaggaacaggtccaaccaatggtattaatccacccacaattgcataaaacaaaggagccatgaccccatcagtagcattttctgtcaccgtttccagaactgctcgtaaaacctctgtttctgagagattttccgtatcccgacctacataattacttaaaatctgtcgtgctgattctaagttaccttttgttaaaggttggataacatctaaagcagctttccgcaaactatgaagagcaaaacaactagctaaaaaaatgctctccaccacaattcctaaaaatggatgtaaccatctagcaatttgaactattaaccaaccagataaaccgctgccaataatgaggataatagcaagtacaattccagctagacgttgtatttgagaactttgacagtgttgcagaaaaaatttacttaaaccagaaattaaccaacccatcactcgcacgggatgaggccaaccccaaggatcaccaattaggtaatctaacaaagccgcaataattaataagtagtcgtgcaaaataaatttcatagttaggagagggaacagggaacagggaaccttgtgctgagcgtagccgaagcaagggaacagggaacaggtaaggtttacagagattttttcttcaataactatgtgcaattaattttgcctgggtacttatatagatgttattagtcattagtcattagttattagtcattagttattagttattagttattagtcattagtcattggttattagtcattgggttattaatcttccccagtccccaatcaccaatcaccaatcaccagtccccagtccccagtccccagtcaccagtccccagtccccagcgatgcactgagcttgtcgaagtgtccccagtccccagtccccagtcaccaatcaccagtcaactgactaaactacaaaacttgcttcttcccctagagatgcttgccaacttcgcgcatcataataaaggtctgccagagtaatactatacaaagcttcttttaacttttggttcagtctttgccacagagtaaaagttacccaatcttccgcttgagcaggtggtggactgttcagaggtatgtgagtcatattttccccagcagcctctaaaatttgtcctatggaaatttgtgcaggttctcttgctaattgatagccaccaacactgccacgaattgagttgactaacccagcgcgacgcatttctattagcagcttttccaaatagggagccggaatatcttgacgtttagcgatcgctctgacagatacaggtccatatttcggctgtaaacttaaatccagcaatgccttaacgctatagtgtcctctcgtggttagtttcatttgttagggaataggtgactggggactggtgactggggacacttcgacaagatcagtgcatcgctggtgactggggactggggactggtgactggtgactggggacacttcgacaagctcagtgcatcgctggggactggtgactagggacacttcgacaagctcagtgcatcgctggggactggtgactggtgactggggatacaatgaaaggattttggatgcaaggattttggattgttcttgtcaactccaatctaaaatctaaaatctaaaatctaaaattattctgactcctgactccttgaactcctgactccttgaactcctgactaataactaatgactaaagactttagaatcatcttcctttagcaaaccacttttttacgttactttaaaaaacttaaacaaatacagtttaccagtaattcacaaactatatatatctctctttgagcatgatcagaattttattttagaaaatatcttgacaagattgataattgtgcaacaatttctgataagagtgtaatatacttggctatgctgagataaaaaaataaaggactctgttcctgttagctcagtatcagttaaaataaaatcgattcaaccacttcaatcatttaattccgaccaaagttgatgcctaaacagaaaaaaaatgaaccccttgttggtgaagaactgctccaaaaagttaaggagctagagaacgaaagcaaggaagagaaagctaaacagtgtggctactatactgttaccaaaaatggtatagagcgcgtgaatatgatgaaattcttgaatgccttaattgatgccgagggcattgagttggacagtacaccaggtgctaatggccgtggtggacgcagtgccagctatagaattagcgtgcagtctaacaacaatttactcataggttcagcttatacaaaacagatgaatcttaaacctggagatgaatttatcattactttaggcaagaagcatattcgactacgccaagtagatccagaagacagagaagatggtgaagtagaagaagctacagcttaatcaaaatttagttgtagaggttttcagctagaacatcagttgtcagctgtaggggtttagcaatgctaaacccagacttgcagttattgatttttgtgtactaaccaatcggttatcagttgtcagcagttaaaaacctcttccccaatcaccaatcaccaatcaccaatcaccaatcactaatcaccaaagactaatgaccaataactatatcggttgttggcaacattggtaaatagtgctgtaaagctttgcgcgtagctgctaaattgcaagttaaagcgatttgctctttctcgagtaaacctaaaatgcagtcggggttgtttcttgctaccactggtagctgatgcaaacctcgcagcgccatacgatctaaagcttcagataaaggttcatcttgccaagcatagagaatatcagtcgtacaaacatctatgagtgtttgactagaaaaattaggctgtatttcaccaggagaatgttggtaattctcccaaagagaaagagtgcggttaatatcgtccagagaaataataccgactaattgttcattggcatcaatgactaaagcactgggtgagcgatcgcggatcatttccatagcagcttctaaaaccccaagatttgccggcatttttttaggataagagtgcatagcatctgccacagaaatttgctgtacaatttccacttgctcatctttcaattccgaaagaccaatctgttgtagattggaattagaattaacagttggtttaattctttctactaaccagacacttaaacccaccgcagccatcaaaggtaaaacaattcggtagtcacgagttaattcaaacaacattaaaatagctgttaaaggcgctctcacactacccgccaaaacagcagccatacccaccattgcataagctggaggagcagccatatattcagcaactccgggaactatcaaagccaaaactttagcataggcagatccaaaggatgcacctaaaaacatggcaggcgcaaacaaaccacctacaaaaccactagcagaactaacagccgtcatcagcagtttcaaccctataagtacaagtaacaaattcaaggaaaactcttgatcttgcaacattgcttgcacagttccataaccaatacctaaaatttgtgggtattgcaaagcaactaaaccaactattacaccaccaataattggttgaataggttgaggaatcttgcccaaaaattgaaacccttgaaagcgtccgctaaaaaaagctttacctaaactaatagattgtgtataagtcaaagctaccaaacttgcacccaaacctaaacccagataaagcggtaattctaaaggactgcgaacttgataagcaggtaaagcaaaagcaggttgagaacccaaaccaatttgagcaattaaagctgctactaccgctgcaagtaagaccacactaacggcagaagtagcaaaagaggtagcccccataaccacctctaaagcaaaaaataccccagcaatgggagcattaaatccagctgctaaaccagcagcagcaccagcacccaacagtaaccgctgcctctcttgagaaacttgcagtacatctgataacaacaccccaaaattagtacctatttccacactaggaccctcaggacccaaagatgcaccactacctaaagaaacagcagcagctatcatcttagtaacaggtcgtaattgttgcttaacttctctaccctgagataaagcaattaaagatgaaagtccaggtccaaaatcttcagtacgccaacgcattaagcctacaattaatccgcccagggtaggaacacaagctaaagtccaaccaccccagactcctatctgtcccaaaaaattttccagcatcaagtgatgaatcaactggatgagataatgaaaagtgaccacacccatacccgtaccaccaccaatgagcatggctaaaaacagcaccactgtttccggggatggctgaagacgattgatcagatgagttaaacgagcagaagatgtgggaaaggcaactggctgagttactttcctcagttgtgtaggaggcaagagagtcatggaaaaacggggtaaatgtaagaaaaaatttattttttttattggttaattattattgtgagccatgactaagcaaccagacaagtatggttgatatccttcatttacacagttttcatcaactcagacaagcagttaaaatttttatgatcagaatagttgaaataggagagaattattagttaatacaagttgttagttatcacagtgagtagttgtgatggggagatagattgagtattcactatcagctatcagatggaacagagaacaggtaatatttttcgttttcctgcctcttacctcctacttcctgcccctactacctcctgagatcagaacttgatttcagccatacttcttagtgaatatagctattgttatagaaatatcactctaaattaggccgctctaaggtgcatcaatgcccgaattgtggagcgcaaacaccgagagatgctaacggcgcacgtaatattatgttgcgtgctttgagggattcctcctttaccgtcagtaatgatggtattgctatcgttacagttcgagctttgtcaatcaatgctcagaaatgttcagcgtaaatgaatcagtaaatggactaggcggaagctctagatgaatatacacacctttgataataattatgttacttgtccgatttgccaaagaaataacaggactaagcctgttaaaacttatatcggattatttacttgtccttattgtcaggaaaaactcgtagtttgtaaaagtggtcactacgtccgtgatccgtttacttggaaaaaaattcttatctcctcggcgttgcgtcgtcaaagccgacctttagccaggatgatcagagatttgccgcttttaaaacgttctttgttagcgttagctatgggaggtgcaattttattcactacaattgctatcacacaggacagcacaaagtataaacaggaactgcttccaggaagtgagaaagtgacaggtgacaggtgatgggtgattggtgatgggtgattggtgattgggttattaacttccccctgccccctgcctcctgcctcctgccgggatgatttactgagtgtcttttgtaatcaattgccaaccggcggattttcccactacttgaagagatgggaattggagattttctaaagcagaagcattcacaagcaaatagggatgcacatcatactgccaatgatattgcagatcgccgggggaagcaggaataatggtgcgatcgctataaaaattcaaggatgaacgagggtaaggaaaagatgtgtagattttctgaactgctggattggcacgtgctatcattgctgccacaggcttgactggataagcttctcctagttcccacatccagtagtcagatttgatcaacaacaacaaacaaatataacttccccaaattaaaatttgccaaaattgccgatcgcctcgttctgccaaaattgctgctaaggtcatagtcaaagctacggcggccaaaatcatctgcaagtctgttgtacctgcactgccccaacttagataaatactagccgcagacgctaccaaagccaagactgcaaaactggttatccaagcacggggataggatgagaataaacgccaattctcactctgagttaaaaagaaaccacaggctaaagcaaagctgggataaattggtaaaatataccaaggctgtttgacgctaaccagagaaataagtagtaaatacacactaatccaaactaggatgagtttagcccagctaaaattgcgattttcccaggtaaagcccacagtttgcggtaaaaataccagccaaggccatgtccatttgagaatttctaggaaataataccaagaagcttcaggctgaccattagcagcagcaatctgattccaggtttgatcgtctaaatcaatttgagagaaaggataaccatagcgcagtagttgggcaacataccaacccaatactggtaaaataccgatgaagattcctgtccacaggtagtaactggtgagtaatcttggtgtatcccaaaagagaaaaactacaacaatagcacctaaaaatatgcccactatgcctttagttaggcaaatcagcccaaaactgataccgacaccaagacaataacgcaagtctcggcgcgatcgcaacacacagaaaatcatcaccattaacaaacttaccactacgccatctagcgttgctaatctgccatgacgcactactggcaacatcgtcagataaatcaaggcgctataaaccgcagcccaacggaggcgaaatatttctctaccaatacaatacagcaaaggcacagaaatggctgtcagcatagctccaggtaggcgagttgtccactcattcacaccgcccagggagtaagcccaagcaattagccagtgcatgaggggaggcttgttatagtatggttcacctcccaaggtagggtaaagccagtgcatagaacctgctttggcacgcaaaatttctttagcaacttgtgccacagtgccttcatcccaatctctgagcggcagtccgccaagattgatgctaaacagcaatattgccaccaacagcaatcctattaaccatagtccatccatccatctgccagaggtgcgatgctgtttttctagatgagtcccaatatagcgtccttcttgcatattctatgctaatcattttactcactggtttgattccatagagaccagagcgaatctccaattttgccataccttcacaaactattttcacaagcaatggctagatcccaaattacctcagttttctctgaaaaataataattttttgcataaaaattttttagttattttttcaacaatttaacaagatttttgccaattaaatgatataaagaatacaaggttaaattggtcaattacgctgaaggagtttgggaaatgcgcctacctgtcattttagatatcgccctgggtttaatttttatttacctgattttaagcttgttagcttccgaaattcaagaattgattgctacaatcctgcaatggcgtgctgtacatttaaaaaaatcaatcgaaattttcttggctggagatgttaaaaattcagaagccaaggatataattgatatggtcaacaaaatttatagcaatcctttaattaaaagtattaaccaagaagctaaaggcattttatcccagttaccaagaaaattcacttggtttatgggtgatataactagtaagatcggaagaacaataaataaatcacaggtaaatcataagacttttaatcaagataaaagtgcgccttcttatattcagagtgatactttcgctaccagtcttttagaagaattacaactgccacaaatcatccatagtctaacagaagtaagactagaaaaatttaaaaaccaaaggttacaagaattacaaacaattttaactcgctcactcagacaaatccaagaaacagaattaccaaagtatattgcccaggatattaaagatgatttagcaactctcacttcagaatatacagaaattgttgaagattttaaaaagtacaagtttgatatagatacaagcgttagtcaaatgcaggatagcttggataaatacatcaataactttcatgcgaatatagaaaatgaaaatcccatactaatagaaacttggaaacgactgcaagctttacagaaacacatttttcccagtgttgaagaagcaattatcatcggtggtttaaaacctaacatgaacgaaattgtccaattactagatacaagtaatactgttgttgaggaaattcaaatcactctaaaagataaaaatagtcaaagccataaaaccattaaagaattaatagataccttaccagatggcatgaagagaaatattgctaacatagccaagcgagcgcaatacaaggctaaaagtacagaggaaggtattgaaatattacggagagaaattgagaattcttttgatagttctatgcaaagagcaggtggtgtttacaaacgaaatgctaaaggagtcgctattttaattggtattctcctcgcttttggtgctaatgctgatacatttcatatcattgatcgcttatcaaaagatacagttttgcgagaagcaattgtttataaagctgtgcaaactatagatcaacaatctgatcctgccaacctcaaaaatattgacactaaggagattttagaggaaattagtttaccaataggttggacaaatgaaaacttagaagatcaaattggttggaatccaacgaagatcaatggcgtacctataatcagtttattaaccatgttatctggttggatagtcagtggtgtagctattgcaatgggagcgcccttttggtttgatttactgagtaaagttatgaatgttcgcaatgctggtggtaaatcaacaaaatcagctagaaatcgagatgcagattaattgatatcattgcggcgctgcccgcctggttttaggtgctatgatcctcaaaaagcttgcactttgtgagccatactcctagcccctcacagataactttttgagcaaaccctacttagggtttgttgaataaacctaaaaccttgatatatcaaaggttagaggctgataaacacagaaattagtgcaagggttttgaagggtataccggaaaaagtgtgcattttttgggatttcaagagatggcaaagaaattttccaatctcctcctgactcctgactcctgactcctgactcctatgccctcacggaaagactt

SEQ ID NO: 74 - DNA, 26424 bp, Sphaerospermopsis sp. LEGE 00249
  LEGE00249_90
ccagtccccagtcaccagtccccagtccccagtcaccagtccccagtccccagttcccagtcaccaatactatggacaacgggaatgaataccgcccttggtacaaatgaaagctagttgctgggcatctaaatttttagcattgctaaaatcgacaccttggactacggcagcttgtgaaccgagatcagaagtttctacaaacctatctccgggatcttgtttaccaggaaaaagtatagttccttgaaaatctgcaccgtccaaatttgcccctcgtaaatctgcacgactaatatcagcatttcgtaggttggcatttttcatattggcagaacgtaaaacagcaccagcaagacgagccgcactgaaattagcattggtgagattagcatgatctaaatatgcttcagataaatctgcaccttgccaattggtgttagttaaattggcataagataattgtgtacctatggcagaaacacgacctaactgagcagcatacatatctgcttccattaattttgcgtcgctgatatctgcccctgtgaaaatcgcatcttccaaaattgccttttgcaaatcactactgataagttgggtactgctgaggttagcacccactaacagggcatgagataagttagctttattcagggtagcgcggcttaaatcactgcgtttcattaacacacgactgaggttagcttcggtgaggttggcttgcttgagttgagttttactcaaatcagcaatgacatcatcataagtatcccagcgcccatcttcacctggactacggaagcgactaccttttaattgagcttggttaagattggcagatttaaacacaactcccgataaatcagcattttctagtaccaagttaaatacagaactttcttcaaagctttttgcacccagttggatactacttaaatcaatgtcattaattttgccactatagacagacaaaatcttgttgattgcctgttggttaagatttaattgttgttctctgatatttccgaaattgccgcctgattccagttccccagcgagaaacagattcatgcgttttaattctggtaaagcttgaattccaatatttaccagtgcttgttgaatagtatctaggatgttagggtcagtttccttcaccagtagatccactaaaaatttgatagattgtgtatcattaataccacccaaggcgagaatagccctttggcgttcttcgtcgctgacaccagaatcaggattaattggttttacgagttcgagaaatttttgagtgttaaccaactgggttttccgcaggttttcttgggtttggatgtaaatttgtgtgcctactaaagttgacaacacagcaatcatgctggttacaccaaccacaaacaaggtaaaattaggactgcgggctatttttagcttagggatggactccttaatagatgtatctgttggttcttcattttctcgctgtggcggctcgctggtattttctacaggtgttttgattggtttgttgatgtctttaacatctatggtatatgtacctgccaactgatcatggaaggcgcgacgacgtttttgggaagtccaacccatgccttcacctagcaccaaaacaatagctaaaaatgtgaataagcctaaatcgggaaaagcaaagctgtagcgccagagaatataagcaatggcaactggactagtccagcgccctagcccttcacgaactacaacagtccttaaaccaggggctttaccctcatcattaacaacccgcaccccaaaccaacgtttgggaatggtgctgccggttttacccagtaaatacaactgccatcctgagaggactagaggtgttaagagggcgatagtccataaaaaattagtgggactggcaacattgcgaataccataactaattggtagggctaaaggccgggcgatcgctctttctgtgagtaccaacaccggatttaaaggtactctttgcagatcgctacgagaattggcataaacaccaatgccaaagggaattaacccgctggctaccactaatgtaatttctgctgcccaagcgcctaaacgccttgttcccaagggtaaagaattagcctttttcggtttttgggactgattagattgatcaatatttctcctcacagttggggtagtcattgcataatttccctttgattctatgtttacgccaatctatacatctatacaagtttttggcggcgcggttaaaataggctattgcttacgttgcaagctattagacaccaaaaatttgtatccaagatacactaaccccgccaatagtgccagactgatcacagatgctaccaatctaaatactgtttgcagtaccatgaagcccaagagtattcctacaccagtaacggcaagcttttttatccctgataaaccctgaaaccaaatttgaaaacgctgaaaatttcggtttaatttagcaaacatagtttgatttgtctgtttttgcgtctcttgtgagttgggttgggtggaaaatgaacttatttccgcttctagttgttccaaacgacgttgcaattcttcttctggttgaggattcataattttttttacctcagctatgataccgattctacaaccgaccaagtatatccatatttggggattgtgttagtgattttagctaatatctatatgcacaaaacctctgtaggtacggaaatgaatgtatcttgtctatagccagaattttctacctctcctgtgtcaattcaggatatttttatgctgagttacaaattcacccaatttccaaatcaaaattaaataacaactcaataaaaattgatacttgaacattgggaacaatacaccattgtcttgagtctaataaaccagaatatatagcactatattaatctatcaagagtcgggagcatgaataaaaatgaagacattaaaactactgacttttgttcccgcaactttggttatgagtttggtatttaaccaagctgttttagcacaaactccatttatccaaattaacaagcaactcccgacagatcctttggttgtcaatggcatatctgggggaacagttcagagtaattgcgggaatattaccactcaacccagtcaagttcttcaggtacaagaatctttaccttatttacgcttaactgttgagggacagggacagcctacaatgttgattgatggaccaggggggcgcttttgtgtgttggcagataattactctgcaaagaaaccagaactgtctggtttttggcaagctggcaattatttactgtacgtaggtaatttatccccaggtaaacataattatgctctctctatttctcaacaaaagaattgaggggactggggactggtgactggggactggtgactggtgactgttaaaaaaatgccattaccgcagcaggtgaacctgaaccaccacgtaacctgagaataccaattactagggtagcgccttggggcggcagttgatctaagttggtgaggttttctaggacaatccgtggttttgctagtatcaaactattagtggtaaaattattatcttgccctgagtctacgccgtgggtatcaattcccaccccggcaatttttctttcagtaattaaaaactcggtggctttaccgctaaaccctggaaagtgcatatttccatgtgcatcctggtttaagaaggcgtttttatctagccatttattttgccaacccgtataaagtaacactatataaccgggtttaatagtgccaaattctgcttcccatgtcaaaatgtcagctacagttaaaagataatcagggttttctgttgcttgttgacagatattgatcactaccgcaggtactacgagagactgggcggaatattcatcaatgctgataccgtcaccgtgaaaactattaggggcattgatatgagtagcactatgttcacccatagaaaaccgtcgcagataatagccatcgtcttgtagttcggctacagtggtaaatttgacgggaggatcaccaggccattgtggtatacctgtgtcaattatatgactcaggtggataacacgggaataggtgatattgtttggctgttggggttgtatagtaatattcctctgtgattcggctattatttatcataaataatcccccaattcttgtaaataccaggtcggttgggggttaattacaagtttaaaatgttgcagcaaaaagtgaatttaaccttagtgaacacctaaaaggttaatgttgtgcaaacataagattaagtttaggtaaattgtcagagttgataattgacaatagacctctccaaaatagaatgtattgatttttaatatattgtaggggcgaagcatttgggcgataatttgacggaaaaatcagacatctagatatcccaaatgcttcgacctgcccccataaataagccataatttcttttctggagaagtctaattgataaattaaacgcagatggacgcagataaacgcagataattttgtacttcttgagatgaggaaatactatctcaggatggaaagtgggattttttgggtgttgaatgggtgttgaagtagctaatgtttaagaaatgataagtaatattgtcaatttcaggtgagatgggttactttaacaaaaatggtaaaagtttttcgacaccacaagcccgaaccttgaaaaccgcataacttcgttgactggtgtggatcgtttacaggatcagcgtttccaaatcaacttccccgcaaggggatggaaacttcagagtgtaaagtccccaaggggggagaaaacacctttccaaatcaacttccccgcaaggggatggaaactcttggctgttaattcagaacggacacttggattaaggctttccaaatcgacttccccgcaaggggatggaaacaaagacatactgtattctgaaggaatgggaatagccgtctttccaaatcaacttccccgcaaggggatggaaaccttatatattccttgaagaacctcaaagatattacctttccaaatcaacttcctcgcaaggggatggaaagaaaaaatctaaataataatggatattaatttacaaaaagaagaatttagctatgcttacatttatgctattaccacagcagcaggatattcctttcaaaaatcatcaagaattttagatgtaggcggaattgatgccacaattacaggtacagtaacagacgataccctttatgaaccacaactagatttacaggtaaaatctacctcactagatatcctcagtggagaaactattcgctatcctttaaaaatcaaaaactacaacgaactcagaaaagaaagaactgttgcaccacgaatattagtagttgttctcatccctgaaaatctgcaagaatggattaaacagtcagaaacagaactgtgtttacgtcgctgtgcttactgggtttcattacgtggacaaccccaaacacaaaacaccgaaaccgttactgtttatatacctcgcaaaaatgtatttacagttgatgctttaaaaaatttaatgcaaacaatccaaacaggagggacattatgaaagcaattattaatgatgtagaaattctcaatcatttacaacctcaacacatagataaatatttaaagtctaaaggttggcatgaacaaagtgtaattcctaacaaagtttctatttggatacaggataactattcagagaataaactcaaaattcaattacctgtagaccaaaactttgatgattattcccagcgtatatatgatgtgattgaaaccttatcaaaagcggaaaaacgctcacaattcgacattttaggcgaaattattacggatgcacctaatttaactattcaagctgtggtcagtcaaattcaaacaccaagcgccacagaattaaaaggagaaattcaattatttggcgtggtatttgataaactgcggcaaataaaaactatactggaaaatcatgattatattttagctattaaagcctatcaagaacgtttaccaattcgttgtacaggtgatttgtttaaggaaaatgaccagtttattttacaaaatccccacaattttcaaattgataatatttgaatgcgtaggtagggtttaggtaaagatattgatgggtttttggtactgaggaagaaaatttttaagaaatgataagtaatattgtcaatttcaggtgagatgggttactttaacaaaagtggtaaaagtttttcgacaccacaagcccgaaccttgaaaaccgcataacttcgttgaattgtgtcgattgcttacgggatcagcgtttccggttttacaatgccttacttattgagaattttttagcacttattgagaataaaaaaagtggtgtggaaatgggggtctgaaacccttgctgtgtaaggcttccagaagtgaactctttccaaatcaatttccccgcaaggggatggaaacaactcccaatcgatctcgattgggttttggatgatcttctttccaaatcaatttccccgcaaggggatggaaatacaacagttaattattcaagaagcaagacggaaaagtaaaggaagtttagaagattttggaataaagtatcaagaattggaaagtgctttagatgaattagctgatgattttgcagcgtgtgttggtgcaaacgcgcctattttatctgattatgctgttagtcgtgaaagtatttatgaagaccattattaaaaatagaaaatggaatatttagtagaacctaaattcaacactttcataaattttactccttaattttaaagactattacaaaaataaaaacatcccactgatcttccttcgcgtgaaataacaaactaatcacaaagattttttacatcacactgagttagcatctttgctcttttaacaaacttttcatcaaatgtataaaactgagaacagttttgactattagctaaatgaaaagcatcagcaaaatctaaaccattttcatgccattcaattacttgagcaattaaaataggattatttaggtaaatattaggtaaaccaaacaaatttctcaaagccttacatatatcatgaggtttaaacttatatctaaaccttaacacccattccgtttccaagatgactgtatctgcaataaaaacatcatgattttgtaatatctctctacttttttgaaactgtaattcatcatcttgagttaaaaatctcacaattatatttgtatcaatcgcaatcatgccaaatttcctcgacaccttgacgaatagcatcttccatatcttccagggttgcaggttcaccatcatattttaaacaacctgctacatcctccaacttagttactggaaaaggctttttaggttgtaataaaatcccattacccatatcaataataataaattcctgacctgcattccaatgatgcgcttctcgtaaagattggggaataatgacctctccttgaggagacaatttggtaatttccataatgtctaaacaataaaaccataacactaattataacacataaataaatagcaaaaacccataaaattggtatcagttatccattttaatcagcaaaacaaatacactcgttttgtacaggtttagcactgctaaactcctacgagaaatgcgattttctcagatacatatttgaggttttatttccattaagttctaactactctcccagtcacctatcacatatcatttgtcaccttgttgcatcagtagtggaggttttcattttttgtgctataacccactcagaaaatgaatttagacagtaacgattatatggaattagacaaattaaccaggtttaaagagtacggtgagtttatcctccgcaaaattgactctgtaccccaacgcccctcccaacaagaagattgggtccctactagcctggatgactgtctggtgcgcttgcgagaagctgcacagaagactgtggaaatggccacttcacctgtgaaaattggtgtgatgggtgagtttagcagtggtaaaagtttactgttaggaagtttaattggttttgcggatgctttacctgtaagtgaaaacccgactacgggaaatgtgactgctattcatattaaaccacaagaaggttttgctacaacaaaaatagataattacaccgttgagtatttatctcatgaaggggtaaatgagtgtttacacttcatgttatcagaagcaaaccgtcgcgctgtggctgctggtttaccacctttacaagttgctaaaattaaaactggtaaagatatttctctttggtgtgaggaagcttggaagagttccaataatttagaattacgctatttattgcgggagttggtgttatttttgcgggcttatcaagcttatggtgaggctttgtgtggtaagcattatcatattgatgcagcaacggcaaaggaaggtttacaattaattgatttgccgatggcgattcaaactttgagatttgatgatttaccgccggcacatattcgtttaccgaatgcaccccaagttctgcaaactcaattattacaaaatagtttttacctgattcgtagagttgatattgaggtcaaaatatctagagaaatttgggatttaaccggggcggaagaatttgttttgctagattttcccggtttaggtgcggctaattctggtgcaagagatacttttttatcattgcgagaattggcacaggtgcagacaattttagttttattaaatggtaaatcaccgggaagcgatcgcgctaataaaatatttaccatgatgcagcaacaacgcctcgggcaagatttaaaagatttaattctggttggtgtgggacgttttgatcaattacctttagaaagtgaaggtggagaaagaattttagattttttaattgaagatcatcctaattcccaatctttacaaacagaggtagtttttcaaaaattaaaagttctgcaaactattattgatggtgcagaagcttttactactcaaaaagaacgcattgttttattatcgcccttgttaggtttatcagaattagccaaacgttctaccaaagtcaaagctggttcagaagaatttttagctaatttagattatcctgattatttggaacgttccaagaaattacaagaaaaatggggtaaactcagcgataaacttttagaaagtgaacctcgtaattctctaggtaaacagttaggttattttgcccaagatgggggtgttagtaaactgcgggacttgattcaaaatcatgtagctactcatggtttaaaacaattatatgaagatactcgcagggcggcggatgtgattcatcaacaacaagaacaactgaaatatatcctggcagaaattcatgaacaaggtatacctacagcagatagtccagatttaatggagttacgtttggcaattgaaagtttagataaaacctacagaagctttcaaaaagacttgggtaaagaaccactcaaagatagacggggagtggtggttagtgatgtgatcaaagatgaattaacctataggattctcaattggagtcagtggacattgttatttaataaatgccaaaatggcacaattaccttagcagagtctaaaggtgcggcgggtaaattatttgaacggggaaatagagtaaataattctattcctagcaaaagtgatgatttttatccagagtttgaaaaaagcgttaaagaactagaagaatttgcccgcgatcgcattcgtcaagctgtagtagacttgttgaataaattagcccatcaagtagtattagaacgggagaaaattcaaacaattcttaatccagagatggaagaattgatagaagataactttggagttgaagccgcagatttattttataaactgttgttaggatgtgatccaaatcagtggaaagaagcaattattggggaaattaataatcaagataaatccatttctcctgatatgatgtttcccctagcgcgacgggataaaaaacacagtattggacaaatatttgattggtctcctgaaagaaatcaaacttcatctcgtgctgcaaatcatcaactttttgtattaagattgcgtgatgaaattacagctagtgcgagtttacatctcgtgcaatatgtgagtgaagttaatcaacaagtaaatgcagaattagaaggaattttagatcaaataattcccagtttgcaaaacctgtctaaaaaagatgaactactcagatatattgctgctggagactcaaccccagaattagcaattcccacttggttagaaattcttgcggatattgcatcaattcatgagagtgatatttatgagtatatttagctgaagaagggaacagggaacagggaatagggaatagggaagaggtattagtattaggctgttttctgcatctaccaaaatccaaaatccaaaatccaaaatctaaaattcatttatgcctgtggaaattatacttccacccaaacatcaactacgagttaaagaaaatcaaagtttggatttacctgctatccaaattgtcgccactaatagtaatattccccatatctctcgcattacttgtagcgtcaaaggaacacccatagaattagcagcggaaattcaacaaacttataaacattttaactctgctacaccccaaaaaatctctaatttgtgtcaattaggacaatatccttatcagttagagaaacctttaaacgaaacagtcaactgtgatttacaggtgattgttgagtattttgattctgatgctaccggaaaaccgatattatctattaagaaaaatatgggtgtttcctgtaatctttggtttacacctgattttcaatcaataactcacaaaaccataactaaccataaaactatgaatccttttgaattagatacctatctcaataaattaagtcaacaattgagtgaaaaactcaatgaaaaacccaaaaaaagatttccgggttggtttgcggtagattttggaacttctaattctacagtgacactttttgatcccattgaagtacctattgcggaagttttacccagagaacaagaattaagattgcgtcaaagattagcagagtggttaaattctcctgctaatttagctttaccagatatcggtgtgaacgagtgggaaaagttcattgctaatattagtaaaaacttagaaattgaaccagaagaactaagcgaagtttttgaaaatgataacaaagaacaatttttagaagctattcgccaaattgaattatgtttaggaaatagtgacagatttcgccgtgctgttagcaaaaaactttatcagatatatcatgaagtttttcgtgttcctacgttagaatcacaaaatttgattcctgtagttttggatattaacagacgggaaacagaaattcccagcgaaatggaagtatcccaagttgaacctttaaaattgcaaatggggagagaagcaagagacaatagaaaaaaagccattgcccaaggtacaatcacttcagttaaagatataatcagcagatttcatcactcacccaaacgttattttggacaaaatagaactttcccagttatcttaaatgactcagaaaataacatccaagttaaccaattaattcaagcagcatgggcgcatttaattgaattaacagaagattatcgtcaacgtgccagaagaagattttccgaaggagatttattaacaggagttttcacctatcccaccgttgcacctccagtagtgagaaaagacattaaagcattagtcgaagaattaggaatagatgatgtccaaacagcttatgatgaagcggtttctgtagctatcttttttctttggcgagaatttggtggtaacttaaatattggtattgaatcttttaaaactcgttgtcggcaagaaaaaaataaatggtcacaaaatgttttagttttagatattggtggaggtacaacagacttagcattaattgaactcacattagaagataaaactccattttttgcagatcatgaagatcggggtttaggtggaagatactataaacttaccccgaaattattaggttcttcaggacatttacaattaggtggtgaattaattaccttacgcatttttagacttttaaaagttgcgatcgctgattttctcttaacagcaataactaacggagacatcgaaagcgacaaactagaagatttaatcaacgccgaattaaacgaacgctttttagaagatggcaaatttaaaagcggtagtttattaaaatgtgtagataaagaaaatcctgaaggtgatgttgctttcaaagatgctttagacacagcagagaaagttctacctacccgatggcaacaagcaccccaacgcctacaaacattttacacattgtgggattatgccgaagctgctaaactcaaattagggcaaaaattaccaggagatggttctttattaaccttcaccctttccgaacaacaaattagtgaaatccttgcccaaagtgcagttaaattccaaattattatccctgatgctatctctataaccatagatagtcaacaatttgaacgggctgcaatttcggctattaaagaagcaattggtattgctaaaggtttgatggaaagccgtttaaatgcagacaataaacaaaaagtagattggttaattctttctggtaaaacttgcaatttagatttagtgcaaaaacaaatttaccaagaatttagcaaatctccttattttgtttggaatccagaacggattacctttgttttagaatttaccaaattagcaacttccgcaggtgcttgttatgcggaaaaattaagaagattaagatttgatcccgaagaatcaaaaaacttattgcgtaaaggtgcaaaccaactggaaataaatgtcaaaaacctattttattatctaccgtgtaactttaaacgcaaaacccaaagtaacgaactattaggaatattcaacgctggacaagaattatatcaacttgcagcctgggaaagtgtagctaaagtgcggacaaattggcaaggtatccaattaacaaatattatctatcgtcaagactatgaagatggagaattgcgtttatggggtagctttgacggtaaaactttaatggagaaattaggaatggaagaaccagaatttctcaaaaaaattaaagtccaatttgaaattgatcaaactttgcaatttagtgttttactctgtcaagggaatccccattatttaatagatgagaagggaatagatatcaattctgtcatttaccaagaatcagaaacaactgatttattcaccgatggaaaattaaaatggaatattgccattgaacagccccatcaagatttaaaagatggtgatattgccgtcaacgtattagaatcagcaacagtagatcaaccaaatgcttatcatttagtatttgcagttgataataatcaaaatcccaaactggaaacatttcactatttacaagatggtgttaatgaaccaggaaaagggttaattagtaatcctttaccaccattcccccaaaatggtcaacacaccttttatatttatcaaacagatagcgaaaccaacactaaaaaatggatacgcatcggcgcacttagtaaaccagacatcaccacagattacccttgtcaatatcatgttacactcgacaatcaaggtatattaagaatgcacgccggtgaagtaccttattggacatcaactaatcaagaatgtttacaagaagaaggatgtgtttatcgtgcagaattagaattacaacctaatgagattgataaagaacgcgatcctttctgtggaatacattaaatcaattgataattgataattgataattgacaattgtttgatttacagcagttttcatgtctttagaccacagtaagggcgaagcattcggatgatagtcttaggtaaaaaccgataattaattgtccgaatgctgatgcttccagcacgcttcgcgaacgcccctacattgttgacacgaaacctaaatcaaaatgtggtttatttacctgaaaatagctgtaaggttgaaaactcttcttttaaggggaataagaaagaaaaaccttttcaattttctgccttgaaattaaatataattgtcgattgtcaattattgaatttcctcctgactcctcaaatattttcttgccatgatgcaacatctacaacaattattagcaacagaaaattctcaaatttctcaattattaaaattgagcttatacggattagaagcaacattaaaacaagccagaatagaataccccaatgatccaggtaaggatttatgtgaaaatgtcattctagaaattcacaatcttttagaacctgaattaattacagaaaatccagaaaatgtagttattgatgaagctaaacctgatcaattattaaatgtattaaatgaactcagggaagtgtttaatacagatttagaattaaatttttatttaggaaatgcacccctacaaagtcaaaatgacggtgatttatggaatgaaattcaccacaaattgttaagagttcctgaagatttagccacaaattggaaaaaacgcgctttagaaatagcagaaaaaaatggtgcaaatttagattatgtcaatctagaacacttaccttttattaaagatgaaattatttattctggtttaaatggtactgttcaagctagaggtttatgtttgtcaaaaaaagcgttttttaaatcagaaattgccccgttatataattcagaagatttgcaattattagcaggatttttacttttatatactaaatttatagagatatatcctgatttacatcatgctttaaaaagtgtatttagttttgatgttgtttccttaaaatcccaaccagaacaacgtcaactttatttagaagcattgagcgatcgcctacaacgcacccaaaaaactgaagaaaacactgatcccatcattaatctacgtgcttggattgacatggatgaagccatacattccctagtgtttgttcccccagcagaacgttattcctggtggggaaaactacaacaagaatcaagacgtatattgaaaaaagtagctaataaagctataaaagccggtcatgatgtgaaaattagacaattatcaggactttatgctgatatttgcgcgtattccaaagatgatgtacagctagatcatggtggaacacctggagaagtattagcttgtttgcggttatacacacgaatcaatcaagaagaacatccggggcgggtgctatttcgatccttacgatgaaaaccgcaataccatataattacttctgtttactgcatatcaggtgtaggagtgggtgaaggagtaggagtaggagttgtaggagtgggatcaggtttaggagtggaaggagaaggggtttgttgggctaatagagtttgttgtgtgtttgcagcttgaaactgtttgggtattgcaatcaccgcagcagttcccaaaaatgctaataaagctacgggtgctaagtgtctcatattgtgattcctgcaaaaacttatgccaccctattttgaacaattatcaacttctctatatcttgctataggtagccttacggatatttctttaggtagaaaaacacattttcaacaagttttaaatttgctgtttcaggaagatgaaaaaaataattttacatatatggatctctgcaaccacaagataatatactaatttcaaaagttggaaaagacaaaattgattattcaatttctgtaagcattcagctatcagtcgtcagcagtcagcttttgaggtttacgccagaaatacctatttgatgattaacaaatttcttaaacattctgactcctgactcctgactccttaccaatttctaagcttattcaccaccagagaaaaacaaaggtaacacaaaagcagcaataattcccaacaaaacaaacacctcaataattctcagaaccaaattactttgcattaactgattaaatttctcactcaaattattaggaaaattaccccgccaaccacgcaaccgactaaaccaattttttggactatcttctgggcgaaattgccatgaaaacattgataataacaaaggcgcaccacccaccttagcagacattaaaagatgaatggctaaacaacaaaccatgatcacccaagctgttaaatggaaataataccaaatatgatccagttcccctaccggtagccattcttccttcatcattctgccagatacaactgctaaaactgaagcaattagcatcaaagtatttgctaaacgttgcagactcacccaccaaattggtttattaaattgtgagagtttttggatagaatcttgttgtaataaccgcctttcaccagcatgaaagctatagagagcgaaagcaggtaataacagtaaaaagaataaacccgcagtaccatgaataccctgaattgggtcgattttaggaatgggaagtttaccgaatctttgatcaaaagtgttataaactaagaatccggtgataatagctgcaatgactaaaatgccattgacaccgtgtattatacgtaataacagaggttgatagggtgctgaacgagtcataagttaattttaagtatttttgaaactactgtttttagtgtaagtatgccacaaaaatatataatatcctagactatacctataaagtacccaattcatgtccgaaactttgcatcttacaggatttatcaaaggagtcacctataaaccctatttaggtgagaaattacaggaaataactatagataattttgatgtaaataaagctagtgcttatggattgataaaatccccaataactgaaattgcttattccaaatgggtttcacctaaaagaactagaagttatccatttgcaaggatgtataatacatataattcctcgaaaatcataactataattcctctaattaaagatgaaggtaaagatggagacagagatttaattcaatattctactatttcttggatgaacctattaaatatttatattgtacttgcttattatgaaaaagcagagaagagtaataaaaaaggacaagataccaaaaataaattgactaatcaaaaatttaataatgaatttgtaaactatcaaattgaggaaatactcgcatatcgtcaaagtgctttacattggaataaaaatttatttgagcaaagatttgtatcaatttttgaaaaagccttggattcctatgattcaatttctcataaaactggagttttggttcactcaagagaaggtatggataagtatttacaaaaaattaccaatgaatttgcagagtttaaaaatatttctttaaaaaattcacataatgctagtaaacgggaatcaatgacttctcatcaactggaatatttagccgatgggttaaaagcaacttttagcattgagaactatttaggaggagtttactatttaactgctgacgaaatcttttttgataatgatacttatgtaatccaagaatctaaaaactcttcaaaagattctttccctaaacttagtgacattcaggatggtttatttaagctaattctattttctaacttagattctttaaaattagatggtaaaccagttaattttgtaactacattaaaacttacaggtaaaaatatagttggtaatattattttaccagatgctacgacgcaagaattagaaattttcttagcagctaataggaataattttaaacctaagcaaaaaggaatcattagaaagttagttacagaatcggaaaataatgctaaaataaaaatccaaatctcttctaattttgcaatataattttatcatgattaaaagtcctctccgttatcccggtggtaaatcaagagcaatcaaacaaatagcccaacatttaccaacacaatttacagaatttagagaacccttggttggtggtggttctgtattcatttacctcaaacaaacctaccctaacttaaaaatttggatcaatgatttaaacagagaactatatttattttggcatattgcccaaaatgatttatctaaattagtcgccgaaattcgtcatatcaaagaaaccgagaaagatggaaaaaagctatttaaagaattaacccatatagaagatattaataaactggaagacttagacagagcagtacgtttttttgtcctcaacagaattaccttttcaggaacaatagaatcaggtggtttttcccaagaagcatttcataaacgtttcacccattcatcaatagaaagactagaaaaattagcagaaattttaacaccagatatcaaaattactaatctagattacagcgaactattaaaagcagaaggtaaagaagtatttatatttctagatccgccatatttaagcaataaacactccaaactatatggaaaagatggagacttacatactaaatttgaccatcaaaaatttgcagatcatttacaaaactgccttcacaaatggttactcacctacgacgactcagaagaagtacatcaaaactttacctgggcgaaaattagccaatgggaactacaatatggcatgaacaactataaacaaaaaacagccgaaaaaggacaagaactatttattattaactacatcctacccaatacataactatctcttcttctcttcttctcttccttcgtgtccttcgcttctatgccttcggcacgcttcgcgaacgtggttcattcttgcaaacttattgtagtaataaaaaataatcttataattctttgcgcctttgctccttagcgcctttgcgcgaaacaaaaaacctacaactaaaacaaaacccccatttttaggtagaatcacacacagcctaactacaaaaccccgaaaatgacaaacttaccagatcctaatatttggtcaaacctacttaaacaattattagaacaccaatcattatcccgcacccaagcagccgaactgatgcaaggatggatcaaggaaaccatccccccagaactatcgggagcaatattaacagcattgcactttaaaggcgtttctgccgaagaactcacaggaatggcagaagtattaaaatctttatctgttcagactacacacgataacagccaaaaccccattcccttagttgacacctgtggcacgggtggagacggcgcatcaacctttaatatttccaccgccgtcgcctttgttactgctgctgcgggtgtaccagtcgctaaacatggtagtcgttccgcctccagcttaaccggtagcgccgacgttttagaagctttaggagtcaacctcaacgcacccagcgaaaaagtgcaagcagcagtgaaagaagtgggaatcacctttttatttgcccctggatggcatcctgcactgaaagccgttgccccactgcggagaaatttaaaagtgcggacagtatttaacttactcggacccttagtaaaccccatgcgccccacagggcaagtaataggagtatttgatcccaaattaatcgaaaccatcgcccaagcattaaaccagttgggaacagataaagcgatcgtattacatgggcgagaaaaattagatgaagccgggttaggagatgtaaccgatttggcggttttatctgaagggaaagtacagttaaccagcgtcaaccccgaagccgcaggagtcacaccagcaaccattacagccttaaaaggtgggaatgtgcaagaaaacgccgaaatcttaaccaacgtccttaaaggaaagggaactccagcccaacaggatgcagtggcgctaaatgcttccttagcgttgcaggttgcgggtgcagttcccttattaaatcatggtcaaggtgtgacagtagctaaggaaattctacaaagcggtagcccctggaaaaagttggaacagttagttgaatttttgaagaattagattcttctgagtggtgttggggacgaaattctacaacattacgtttgatggtaacgtcataattaccaaaaaagtcatgtcctaacaatcccgtttctaattctgcaccagcgatcgccacaggaacttgactaacctttaccccgcccacttccatagaatcaagatagccaactggaaactccacacccttagcactcacagtattagctttagcaatagccacaggcacgacacctaaagcctgtgctacatcttgagtaattacagaaccactagcgccggtatccacaatcatctcaaaacgctgcctaccattaaaggtaacttccacaatgggagtgccaccaactcgtcgtttaattggtgctatgaacaccagattattataggctgtagtttccgcagccgggaaaatcggatctggagggggtagaggttgtaccttggcaacaggagtaggagttgaataacgttgtattttgggctttggttgaggaacagccacaactacctcttgatctggtactacggaagatgctaacctactggagttagctttttgtttggctaatttaatttgaccctggtattcagcaatttttctttgagcaaaaggaaaattaggactgtctcgccccacctgtttcaagagagcgatcgcatcctcaaacctactcgcgaccagatgccaatcatctggagattgagcagatttactgatactcacagcaccagtagctttatccagtgccaattctaatggactggtttgtgtactttgttctaattttggttttggtttggctgataatgacgctggttgcttcattggtggctgtatcgctgccaaattaccaacaggcatagatggttgactaccaccaacccccgttgtctgtttgttgtcactacaggcaacattcaaaaccaccagactaccggaaacaaaaattagggctgcgcgggataaagaagactcaagcatagttactttcaggttaaccgccctggctctctccaagtgtaccgccccaaacaaaaatatgctccaggctttatgatttaattggttatttgatatttaacccaagttgctagtgataactgtttttgcatagcataataaactgtcttttgtaggtgattcatgattggtgactgggaaagacttttaccaattaccaattacctattccccattccccattccccattccctattccccattacctattatttatgtctttatctgatgcaatacccgctttacttgtcttagcagatggaacagcttatcatggttggtccttcggcgctatgggaaccactgtcggcgaagtggtgtttaacacaggcatgactggatatcaagaagtattaacagatcccagctacacagggcaaattgttatttttacatatcccgaattaggtaatactggcgttaaccccgaagatgaggaatcaattaaacctcatgtcaaaggagcgatcgcccgcaatatctgtcacaaacctagtaactggcgctctacccaatctttaccagattacctcaaacagcaccacatccccggtattttcggtatcgacacccgcgccctcacccgcaaaattcggatgtatggcgcgatgaatggtggtatttctacatctatactagatgaatctgaattattagaactggtgcaagctgctcccaacatgacaggattaaatctggtgcgggaagtcaccaccccagaagtttatgaatggtccgaagctacgacagaagtttgggaatttaacccagaatctgtagctaagattggggaaaagttcacagtcgttgctttagactttggcgtaaaacgcaatattttgcggcggttggctagttatggctgtcgcgtgattgttgttcctgccaatacaccagcagcggaaattcttaaatataatccagatgggattttcctctccaacggacccggtgatccagcagcagtcacagaaggcattagcaccgttaaagcactgctagaaagtcaaaaacctatgtttggtatttgtatgggacaccaaattttaggtcatgctttgggcgcagaaacctttaaactaaaatttgggcatcgtggtttaaatcaaccagcgggtttacaacaaagggtagaaatcaccagccaaaaccacagttttgctattgatccggattcattaccatcagcagtggtagaggttagtcatctgaacttaaatgatcgcactgttgcaggggtacgtcacaagtctctaccagtgttttctgtacagtatcacccagaagctagtccaggaccccacgatgctgattacttatttgagcaatttgtgctagaaatgcaaacagcacgtcaaacagcgatcgcttaagttaatcaacaataaaaatgggtaatgggtaatgggtaattggtaatgggtaattggtaattggtaattaggttatttatctttttcccagtcaccaatccccagtccccagtcaccagtcaccagtcaccagtcactaacctagacaacataagtcaaaaccatctatacttgagcgtttactttcagtcaagaggacgaggagggagttattgctgaaccactgaatctaaccgtaagcctgagaggtactcgcgaagcccgggataactgccagctattccgcctcacaggtctgttagatgctttttctgaacctacatttcgcaaggtactgtctggaaagattgatgaaggtccaaagcacataattctggatctatcacaaatcgactttgttgatagctctggtttgggtgcgctggtacaactagcaaagcaagctcaaaccgccgaaggcactttccaaattgtcaccaatgcccgcgttactcaaacggtcaagcttgttcgcttagaaaaatttcttgccctacaaactacagttgatgcggctctagaaaacatcaagtcgtcttgattgcttgaccacaaaaaatcaatttagctatcccgatgagcagtaggaaggtgaggaagttaaaaaaatatgaagaatatattaattctccatcttcctcatctttcccaactcctcaaaatagccactagacctatattttcagactcaccaatctccccaatcaggaatttatatagttttaagtaatatttgttagtgttgaatatgctcggtgtgctatgatggcatactgcacaaaaaataaatgttcgtaaagataatcttcccaatattagtaggtcaaggaatgatgaacaggtgaatccccaggaggaagaagcaaaaaatggaggagatgaaactgtaatgcagtattcatctgacattccagcattgttggtaaacacgacgcaattaccccaaccattatcccaggcacaagtacaacaaatttctccttctgccttagcttacttgggggatgcaatttacgaactatatgttagaatgttttttctgtggccacagcaaaggccagaaatttaccatagtttggtagtagcgcaggtcagagcagaaacacaagccctacatttgcgatcgctgactcctaatttaacgagtaaagagttagaaattgtccgccgaggtcgtaatgcagccgcaggccgtcccaaacgactaaatcccgaaatttatcaacaggcaactagtctagaaactttagttggctatctatacctcaccgattacccccgtttaacagaattgttacaaaaactccatctagagaaatagtgagtagctcaatctcttgataggaaaatcatttgtaacggttcataaaattgagggaatgtcaatgctcacctatttactaaactcaataatcccatgactaaccaaccaagaaaaattaatcacgctggtgaagcaaaacgcggacaacctataaaaatcaagggtaaacgcgttattgctaatcctgttcgtactcaaagcaacgcagaagttaaacccatatctcgcaaaccgcgtccatctcgtcaatcttcccaacccttaccagagagcaaatccacagaagacagtgatctcatctacggtcgtcatcctgtattaagcgcattagaaaatcagcgcaatctcaatcggatttggattactgctcgtctgcgttatgatccgcgatttcataatttaattctccaagctaaggataatggtacagtaattgatgaagtcgaacctaagcgtttagaccaaatcactcaaggagctaatcaccaaggtatagcagcgcaaattgcgccttatgcctacatggaattagatgatctgattactcaagcaaaatcagtcaccgatccagtgattgttgttgctgatggtatcactgatcctcacaatttgggggcaattattcgcacagcagaagccatcggcgctcaaggtttagtaattcctcaaagaagggcttctggaatcacctcaactgtggttaaggtggccgcaggtgctttagaaaacttttctgtagccagagtcgttaacctcagccgcgctttggaacaacttaaagaagctggtttttggatttacggaacagcagcctctggtagcgaacctgtacatacagtaaaattcagtggacctatcgttttagtaattggtgctgaaggtgaaggtctgagtatgttgacacaacgatcttgtgatgttttagtctcaattcccttacagggtaagactcctagcctaaatgcctcagtggcagcagggatggcgctttatgaaatttatcgccaacggtcgttaaatacccactatcttgataaattacatacattttctttgaaaaaataaacctaaaagagtataaagaaatgtaaaactgaatctatctaacatattctttaatacccagtatcacgtttataaattggtgaaaaccatgaaaactatttggcataaccttaaggaagggctgattagcttatctaacggtctaggcttggcttggtgggttgaaattgtcacccagaatcctcgttgcacctactactttggtccatttttaagctcggtggaagcgacatctgccagtaagggctatctagaagatttagaaaacgaaggagcgcaaggaattatagtcaatgtcaagcgttgtaaaccttatgttttaaccattgctgaagacctgggggaaaggattgaccgtaaagtaaagcctgcctttagcggtcaactgtaatacaaatctataggctgtcatcgttcctgagttaattttgagttaattctgggaacgatgggcaacaataggtgactggtgactggtgactggtgactgggtaataaattttatatttccctatcaactatcaccaattacctctggatgtgctgctaaccaatggtcaatatcccaaagtaactgttggggaatttcccaggggaaaaggtgggcggtattggggtaacattgccaatgagagtttgtaaggtgttttgctgtttctaaactagaatcagctgtaatgtgacggtcttcagatccagccagtaccaaactcggacatgagattttttccaagtctgaaagtcgattgtaacctgctttaatggcgctataaagagcgcgagtagcatagctagaggtttgtaaataagcttgtagggcttccctggcaatgtaaccgtaagcggtgggtgtatgttgttgaattaaataacgaaagagcgatcgcttgccaaaagtttcaatattccaagaccaaccaggtttaatatagtttaatattcccgctacaccagtataaagattatcttgccaagagataggcggatgattgccccaaggtctagctgaggtggcgattaaaatcattcctgtgactcgctgtggtaaacgcaatgctaattccatcgccaaaatgccacccagtgaccatcccaatacaaggcatttttctatctgaaaacggtctaggagagcttctaaatcgtccaaatggtcttgcatatcaaaattgatattgcagcggcttttaccgtatccgcgcaaatctggggcaatggtttgaaaacgttttgatagatgatgagtaaaaacagaaagactacggccagaaccaggatgtccgtgtaaaccgagtatgggaaatccttgaccttggatgtaaacgttaagaggtaatttataattcatagggaatagggaatagggaatagggaatagggaatagggaatgggtaatgggtaatgggtaaaagtctttcccagtccccagtccccagtcaccagtccccagtccccagtccccagtc

SEQ ID NO: 75 - DNA, 25967 bp, Sphaerospermopsis sp. LEGE 00249
  LEGE00249_92
ggactggggactggggactgggtaatcaattttatgtttctcaatcaccaatcaccaattccctcttgccattactaatttgttatgctattatagtatcctgatgcggatgtggcggaattggcagacgcgctagatttaggttctagtaccgcaaggtgtgaaggttcaagtcctttcatccgcattttaaaaaaattgatcataaaaaacttctgttggcgctgatatcgaagttgataaatcagcatggttaaaataatggcttggattcagcagagtgtaaacaacaagaaatctgggtaaaacttgtatttgctgataaatacagagagattggttgagtataccgtgaacagcaagctaaaaagctatttgcggtaaattacagtatttaataaagttaataattttttataatttgattgtgaatatgtttggcgtgattcacccaaaatatttgattatcgcagtatctgtaagcaagtgatggaaaacttacaaattgactaagatttgataatctttaaatacagccggagtcaggagtaaaactctctttctgtttatgtttcacttttgattctgtacctgattgatctgcaatctgctgtaactctgttatttttgagagttcatacaaaataaaacatctggctttgtatttatgactactaaatctttgatgttttatacttggtttcaattgtgatgtatctgctatgcaaattcaaatcacaagtctttaatttagctaaagcaaaagcaaaatgatgacaactcctctaggtagctacaggttgtttaacaaactacatcccctgtctttgttggcacagttaagcacaaagaaagtaacaggttgtttaagtgtatttactggattagtttcttggtcaatttatttagaagaaggtaaattaacttacgctacttattcagataaactatttgaacgtttggagagtcacctacaacgtttgaatcgggaaattcctgcttttaacaatgtaacttatgaacagatgggtttgatatatcagtatggcaataaccgtcaattgataccaaacgctgactatcatgcgatttgctggctagtaaatgaaaattatattacccatcaacaagcagggatgttaatagaagaactggccaaagaagtgctagagtcttttatttctttaagagaaggtaactataaacttaatcctgataattccttaaatgaactaccaaaatactgtcatctggatttgcaattaatagtagaacagtgtcaaaaacagttacgttatcgtcaacaaattcagtcaaaaaaattatctaatagcagtttaacaaaacaaacaacatctgcaacaaaaacagaagatgaattagaggataaatcagcaaaatttgccactgttgaaaggaattttcataacaatttgccatctgttttgagtgagcaattatatacaattgcctgtattgatgatagccaagcagtgctgaattctattagacattttttagatgaaaaaacattttctgttgtcatgattaatgatccaattaaagctttaatgcaaatcattagaagcaaaccagacttaattttactagatgtagaaatgcctaatttagatggttatgaactatgttcattattacggaagcattcagcatttaaaaatacacccattattatggttactggtagaaccggatttgtggataaagcgaaggcgaaaattgtcaagtcatctggctatttaactaagccttttacaagatcagatttgctgaaaatggtatctaaatacattggttaatttaatacttttcgtaagtattgagctatcagtaatcagccaatggctacgccacacttgactaaaagctttcaccctaagaatgagaatttgtgaatggggaaagtctttacagaagtcagaagaatattgaaattcttattattcataatgcataatatctttcaatattgaacctgatagaacttttcaagttcagtaattacgcaaaacagaacgaaagtaggggtaattcatgaattaaccctactcaagaatcaggtttttagtttaatattgcgtaagtcataaatttttgagaattttgccaacaaatatttgaattacagtcatgagcaattctaaacaaaccgtgtattatcaaactattcaaaactctttgggagatagctatcttcaatttcaaatcaatcaacaaactacagctgtattatccgtcgctcacacccaagaagcaattattgtacctattgaagctgtaacatctatgcctaatatgccagcctgtatattaggattgatgaattggcgtagtcgggtaatttgggtaattgatttgccaaaaatgtttaatttagaaggtttagatcatcgcctgagaaagtataatattatcgtgaccaaagtagaatcaaagcttttaggtttagttgtgcaagaaattaaaggtacgactaaattgatggctgatgatattcattctcctgtgggacaagtggcggctagtttagtgccttatttatgtggctgcgtggaacaaaaagaagaaatattgttggtattagatgcacataatattgtaaattattctcatgggggcagtgattagttaatcaagctcagaaaaatcattttttgttgttattattacatagagtcaggggtattaatttaggggtattcatttatgtttaataaaactgacactgctcagactggtgatcccaataaaaaagcatctattaagacattatcgcccatgacagataagagaaaagaagttaaagaagttgttgaacaggaacatataacaactactcataagtattttgggaaaaatataattaataaatatttacagcaagtgaaattaagagcaaaagcattaattttttccattgctatcggtaccttgccggtattgggaattggcataattgcttatagctttggtagcaatgtgattagtaagcaaattatcaaaactcaagaaaataaattaattagtttaggtgatattattaatctgtttctgttggcaagatatggagatattcaaattctctcaactttgccatttttgactaatgctgaagttagtaaaagtaccactcttgccgaaaaaaaaacagtattaaatcggttcattacagcttatcaaggttatgatcatctggcggtttttgacttgaatggaagagtgattattcaatctcaaggtgcaaccagtagtcaagaacaaaacttgaaatattttcaagatgttatacaaaagaatgctcctgttattagtcaaccagaaacattacaaaataatgtagtagtgatttatattgctgctcctgtgaaagatgtagctacaggaaaagtgattgctgtagtgagaacacgcatacccatgcaagggttaatagaagcaataaaaaatcaggtagataataacaaagattattatttagttgatcatgaggggaaattttttctcagtcttcagagggagttattaggtcaaaaagctacagtaatatatcctggtttagctgacttgctgaacagtgaaaatgtggaaaattctacaggagtgcgaaccattcatcaaacgccacaattggttagttatgcaccgctaaaaaaattagaaggtttaccggatctcaagtggcaattaattctggctgaaaatgctggaattgcttttggaccgcaaagacaatttctcaagctgattgctaatatcacaacattaatagcattagtgatgacattgctggttgcttggttagcaaagagtatcatcaagcaaaattcggctgaattagtagcagtagaaaacctcactaataaaattgagactcctctggaagatcagaaaattgccgaattacctgaagaattacctgctgatggtaaggattatattcaggtgaatcaagaatctatcaaagaatctatatctatatctgaggaacaaaagcagcaaaaagatactctgcatttacaacttttgcaattaattagtcaggtaaaaaatgcgactagaggtgatttaaaagtacaggcgaaggtgcaagatggggaaattggtactattgctaatgtgttcaattctattttagaaagcctccgagatattgttacccaagtcaaacagaatgcgagtgaaattaatagagatattggctcaaatcaagactatatcaaatacttagcagaatcagcaactacacaaattgaagaaataaaccgcaccttagtaacagttgagcaaatgaccaaatctatccaagctttagcggatggcgctcaagaaattactgctattgctaatcatgctaaccacaatgctaacaaaagtggaaaagcaatggatttgacagtagaaaatattttatctttgcaagaaaccgtgggcgaaactgccaaaaaagttaggcatttgggagaatcttctcaacaaatttctcgtgtggtttctttaattaaccaaattgcgattcaaactaatttgttggcgattaatgcaggtattgaagcggcacgtgcaggagaagaaggtcaaggttttgctgttgttgcggaagaggtaggggaattagcaacacgcagtgcggctgctactcaagaaattgagcaaattgtcgagcaaattaaacgagatacagatgaagttgtgaaagctatggaggtggggacaagtcaggtgattcaaagtacgcaaattgccgcagatgcgaagcagagtttaagcgaaattgtagatatttcccaacaaatagatgcttttgttaagtcaattgctactgcttcagtttctcaggtagaaacatcacaggtgattaaccaattaatgaaaaatgtgctggctatttcacaaagcaatagcgagtcttgcagacacatttctacatctttacaaaaaactgcggagatttcccagcaattagaacaaaaggttgagacttttaaagtcaattaatttaaaaaataaataaggaaaaataatctatgactacagataaagaactagaaattcaaatgcagtttttggaggaagcaactgattatttgaataccttagaaagtatcgtactggaaatagatacaagtaaacatctagatgtagataagattaatgctgctatgcgagctgcccattctattaaaggtggtgcggcgatgatgggttttaaagttttgagtaatttggctcatcgtttggaagattcttttaaggttttaaaaactcggaaaaaatctttaaaaattgatactcatttacagagtttattgttatctggagttgattggttacggcaaattgtagaattattatcagatagaaaatctctagatgataaatggttaaggactttttgttacccaatttttgatgaactgcatgagcatttgggtgatccttctccagaggatattactaccatgctttcaccagaagatggtcaagaaattattcctttgctgtttgaaacggaagtagaagaatgtctgcaaactttagaacaaactttagaacaaactttagaacaaactttaggatctttatcagcaaatagttctacaaatgatttatattcacaagtagaagtgatggctacagagtttggtggtttgggtgaaatgttggagttacctgcttttactcagctttgtgattcagtgcgtgaacatttagcaaatcatcccgatcgctgtgtggaaattgctcagttagcattgcaagcatggaggcgatcacaagctttagtattaacaaatcaacgggatagaataccagcaaatattgagctaggtgagttaggggaagtagttgttaatcctattcccccacaggttaatactagcaatatccctactgaaaatcaagagaataccttagtagcagaattagtagcagaagtagtaattcctgattttgcagatttagaaatagaattacccccagaaataaatgctgtcgagtttcctgatcccaatgtagcatttactcaagagaatacatccttagactataaacatattgaacgcaaaagcgaaatcattggagttaataaagataaagaaattcatgaaaatacagttagagttcctagtaaacaattagaagaaattaatgatttatttggggaaattatcatacagcgtaatggtttaaattcccaattagaaagattacgtaaattggttttaggactaagccaacgagtgcaaactttgcatcaagaaaatcaacaagtgcgtgcagtttatgaaaaaatcattagcgaagatgtaaattctggagtattaacatcagcagagacgatgagagaaacagaaacattaaatcgctatcaaaaattaaacttgctttctcaggatgtgatggaaactattgttcaggtagcagaagttgccagtgatattcaactcagtattgatgatacagatcaaattgctcgcaagttgaataaaacatctaagcaagtccagagaaaattaacgcaagtgcgaatgcgtcctttatctgatttagttgaacgttttcccagagcaattagagatttaaatgttgaatatggtaaaaatgttcaattaaaaattgaaggggggaaaaccttaattgaacgtagtattttagaagctttgaatgaacctttaatgcacttattacgtaatgcttttgatcatggaattgaagatcctgctacccgtcggagtttaggaaaaccagaacaaggattgatagaaattaaaggatttcatcgcagcgatcgcacaattattactatcagtgatgatggtagaggtatttctatagaaaaaattcgccagcgtgctgtagctatgggtttggataccacattaatagctactgcgagtgaagatgaactattatcactaatttttgaacctggttttaccacttctgaaaaagtgacagctttatctggccgtggtgtaggaatggatgtagttcgcaataacttacaatcagttcggggtgatattcaagttgatacacaagcaggaattggtacaacttttactttatcagtgccatttactctttcagttgcaagagttttattagtagaaagcgatactgccaccagtccacatcatcgcatggttttagcatttcctacagatgtagttgcggaaatctttttattagataataagcaagttttttcaatggatggtggagaatttctcaaatggcaagataccatgttacctttaatgcgtttgggtaattattttgaatttaattgttctcactatcatcatttagaaatagaaagtccaacgggaataaatgctagtagtgtgttaattatcaaacatgatcatcaaccaatagctgtacaaatagatcgttgttggggtgaacaagaagtagcaattcgtcaagtggaaggaaatatacctttacctgatggttttagtaactgtacaatgcttggtgatggtcgagtagtaccattagtaaatactaatgaattagtatcttgggtaacaaacaatcaacgtcctcataaaactaatcaattacctaccactaaattaaaaacagcttttctcaaaccacaaaaaccgaaacccatagctagacctactcatcaaaaaggcatgattttaattgtcgatgactccattaatgtacgacgttatttagccttaactttggaaaaaggagggtatcaggttgaacaagctaaagatggtcaagatgcttgggaaaagttagaaagtgggttaaaagtgcaagcagtaatttgtgatattgaaatgccccgtcttgatggttatagctttttagaaagggtaaaatctcatgttgatttaaaaagtattcccgttgccatgttgacttctcgtagtagtaataaacatcgtcaactagcaatgcagttaggagcgcgggcgtatttttctaaaccttataatgaacaagatttattgagaacattagaaaatatgatttttagaatgacagaaacagataataattgaaaggtaccggacttcttaaaaaagtccggtatctgagtattaggattcaatattaaagaggttattcagttttgggtttatcttaagaacctgtttcttcgttagttccttcagcggagacttcttctttcttcttctcctgttgttgttctgcttgttgaacttgttgcaagtgaatattatttacttggttaataaataattccactgcttgacttactctttgttgttgttctgcttctccagaaacatcataacaacggtaagctggtgtaattcccaagataaatttttcttgttctgcttctaacaattcaacagttgcgttagctgcaacccaatttttttgaaatgggaaagaggtgacaatactagcgacaatggaagctacggccggacaaatgactggtagccatttcagccaaggttgtccggtttctaacttatccaccaatactaaaattggggtgaccccagacaaaattacagtagaaatttgcaggatatagtaaagatttcttgcccaatttctagtgcttttgtaatcatcaatcaaatcttggcaatactctaaagctttggctctggcaggaactatggtattgttttccaaggaattactattctgtaataaagaggtgtatagttcagctttttttgctagttctgctttttgagcttcttttctagcattattaactgagtttctgttgaggagaaacaaaaaaattgcaatagctaaagctccaactccagctagtacatactgttgattactagaatcgaaataaatgacgaaagccgcactgataaaaacagctgctaatagataatcaatcagctttaagaacaagagcatttttttcacctggcgaagaaaatggataatatgtacaggccatgtatgactcaattaaaaattgagtgaaagtcccgaaataaggttattttcgcaaacaattaattatcttacacaaaagtagcattaaatacaaggttgtcatgcggctagttaacaaaaataaaaatattttgatgaaaaatttaaagttttgtaaaatccatacatttgatttatacctttgtaagtattcagcaatcttccatcggttttcatcaacaagaggttgaaaaaacaaattaaaatattcatgaagtaattgcacatatttttaaactgtgagaaagaaaaccattaatatcatggtgatagtcagagcaaaaattaaagcatattcaaatctacgactaaaaaatccgataatagtgattaatcctactaataaaatggcaataccaatatattgttctttttgcaaatttttagcgattaatgaatcattagatccggaaggagtttcttcaatattattagtttttcgtgttgagtattgatatgaatttatctcatgcagagacgcagagacacaaagagtatgaattgttaaaatttgctgttttgtaattttcataaatcctgtattcttgccagatatagatgatagagaaaaaatgtaaatatttagactaattgccttataatgtttgggtattattaggtgacagtaaaaccgcttagttaggggttgctgagaaagtctttccgtgagggtataggagtcaggagtcaggaggagatttgaaaatttctttgccatctcttgaaatcccaaaaaatgcacactttttccggtatacccttcaaaacccttgcactaatttctgtgtttatcagcctctaacctttgatatatcaaggttttaggtttattcagcaaaccctagttatatttccatcagcaacatcactactaaaaattgcctaaaatttccctcccagtatgagatataaaccatagtatatatctctataagtcagtcatcagcaagaggaaaaatagtcaaattacgtctaatgttgtgaatagatattcagaaaaatggacatagaatatgcctctttataaactagaagaatttgatccaaactatcgtgaaacctttggtggagatgatattaaaaccttgaatctctataccgaaggaggaacagaagtaggtgcagttgctgatgctttagtcgatgaaaatggcaggtttagatatttagtgattgatacaagtttagatactgttggcaagaaaatattactacccattggactagctcgcatcaattatcccgctgggcgtgtctatgtcgatggactgagtaaacagcaagtagaacacttaccagagtaccgagaaaacatcattgttgatcaatcatttgaagaattggtacgctctatttatcgttctaaccttggtactataacttatgaactggaaacttacaactacgaacaagaaccaactttatatggtttaaatgagcaatatcatcaaactctcagactttatgaagaacgtctaattgctaacaaacatcgggtgaaaacaggagaagtagcagttggtaaacacattgaaactgaaactgcacgggtgacagtacctattgaaaaagaacgagttgttattgatagagttcaaacaccagagataggtacaatagtagaccccaacgaaattaaatttcaagcaggggaagtagtacatatagatgtttatcaagaaactccagaaattcataaagaagcatttgttcgtgaagaggtgcgagtcagaaaagtagtagatcgggatattgtggaagcagaagacacgattcgccgggaagaattagatgtaaatacttctggtgaattaaatatcaatgaaaatcgtgcataaattcatgaatcaggaatcaggagatagtaggggtttagatccccgacttcttcaagaagtccgggatctgggtattgggtatttttcatttccaccaaatatctgacttttgataattagattttctggcgattcattcgtgagaaagatggaaatatcagcatcaattaatattcttgaaggtaagaaattcagaaatacttaggacttacgcaactggcatatttctctgttcgtagtaagcgatttatcgcttatttttggcactaaagtgcctactacagacttaaatttagactttccttgtgacacttgcgtaagtcctgatactattaaccgttgaggaaaaatataatggttctttacaaattagaagattttgaccctcagtaccgcactacttttgaagacaaagacattaagggattaggagtatatacagaaagaaatgatgaaaaaatcggtacagtccatgatgctttagttgatgaaaatggacattttcgctatttagtagttgacttaggcttctggatttttggtaaaaaagttttactacctattggtcgtactcgcatcgactataataatgatcgcgtttatgctcttggtttaacaaaagaacaggcagaagatttacctgaatttaacgaaggtttagcaggagattacgactatgaagaacgggtgcgtggtgtatatcgtaaacccgactatcgtaccacaccgttagaaacatcaggttcagtagaatcaccaacccccgtagattccagagaagtagcaacaacctccacaaccagaactacaccaacttacacccgtgatacttaccgctacgaacacgaaccagagttatttggattaaatgagcaagatcatcaaactctaaaactgtatcaagaacggcttattgctaataaacatcgccgcaaagtgggggaagtagccgttggtaagcacgtagaaactgaaactgcacgagtatcagtacccgttgaaagagaacacgttgtgattgagcgtgtcacccctgaaaatgctggtagaacagtttcttcccgtgaagctgatttccatgaaggtgaagttgctcgcatggaaatccacgaagaaatcccggaagttagaaaagaggcttttgtgcgggaagaagtgagagtgaaaaaagtcgttgagcaagatactgtcgaaactcaagacacagttcgtcgggaagagttagatgtgaatgctcctaatctcccgattgaagaacgataattagcaagtattcaggagtcaggatttaggattcaggattcaggagtgagaataattgtaaaatcaggaatcaagagattcaagattttatcaaatacatcaagataatcaaagtcttaatttattctggatctggattttgaattttgaatccttctatcttaactattgaaataatattgattgtatttaatgaaccacgttatgcaaagcatttcccgaagggtagacacgaaggaagaaaagattatccctctcttggaagaaaggttgtttgttgatcataataaacaaaaggtaggagaggtgattgttcgtaaggaaatcgaaactgagatgatccaagttcctgtgagacgggaaaaattaattgttgaacaagttagtccacaacaccaacaattagcagaaattgatttaagtcacggggagattcctggtattgagttaataaatgaggaaatatcaaaagattctagtttggatagaggtttaacggtgagtggagagtttatttccccaaaaattgctagtttgcttttaaatgcgatcgctcaagaaaaagatcatggttgtcaacaagtcaaaatcacaatttctgtagaaaatcaatcccaacagcaaaagtatcaagaatggtttaaccgttgttctcattcttgttctcattcttctcatatttaattttatggtgggtattacccactttttaattattaattaatgaattaattaggggttgctgagaaagtctttccgtgagggcataggagtcaggagtcaggagtcgtaggggcgaagcattcggaaaataacctggaacagaaattgataattgttcgcccgaatgcttcgcccttacaggagtcaggagtttttttattttggattttggattttggattttggattttggattttgttaactccaatctaaaatctaaaatctaaaatctaaaatttttctccccagtccccagtcaccttaaaaccgcccatcctcaagagacaggcggttatttaatgttgcttattaaacagaaaaacgtatcaggttgtcattacaatgaagaaccgattccagcgtaggctccataaaagaaaatacctacaacagtaattacacccaaccctgcgattgtagccacaacccacaggggaattctcccacttccagacatggttttctcctcccttaacaacaaatcaacagaaagttaataatgatgacgattccagttagttaaagaagtaactggagaacaaaataccgagaacgaaaattaataacagtcccaggtacaaagaagtacggtttagttcaacaggttgttgattaggattaggcgttctttccatgatttgctcctaacgttgaataaactgcattgctgcgatcgcacctaaaaagaagacagtaggtacgcctaaagtgtgaaccgccagccatctgacagtaaaaataggataagtaacaggttgattgacgttattgccggtagccatgatctcaaattacttttggataaatgtttctacttgtttcttagcttcgtaacggttgctaacgatgggtacttcttgacgtacttgagtgaaatactcgttaggacggggtgtaccaaaaacatcgtaagccagaccggtgctgacaaataaccaaccagcaataaataaagctgggatggtgatgctgtgaattacccagtaacgaatactggtaacaatgtccgaaaatggacgctctccagtggtacctgacatttaactaccttcgcaaaaactactattgagtctattatcctacaaagtttagaaacagttacaagttgcaactttcttctcagaaaaggttatcacctaagcggcctcagcttgattggctgtttctgcattggtggggttatatttgagcaaaacgccgtgatcaccgatgataaaaccttgatcggggctaaaaaatacaattttgtacagattagcagcgacttcttccacatcacggtctttttcccaagtttggccaccgtcggtactgcgtagcaagttaccgctaccaccaccaatccaaatttcatcaggtgtgcgataggctaaatctaataaaccccagctagttgataactctggatattctacatctaaccattcatctgatttagctggatcactaaattgcacttgaccacctcttgctaataaccacaactggccgttatcagcaaaacccatattttctaaacgacgggaactattacggttatggggttcccaagctgccattcctggttcccaaacagagtaaaaactacctttcgcagaaacagcaatatatttaccatcgggcgatcgctctaagttccgcaccacacccacagcagtttctacctgtgctttccagtttagaccaccatcggtagttttataaatcgcgcccacatcagtggccatttcggctgtaccttcagccagtgcagtcaccaaaatgggactaccaggtaatttttgactcaaaggtaagctagaccaagatttcccaccatcactggtatgcagcaacaaagaaggttcacccacgatccaaccttcttgaccggcaaaacttactgagtcaaaacgggatcttagctcatccacagccagttctaaacgttgccaagttctaccaccatctttagtttccaacagagtggcattactgcctactaaataaccatgattggggtcatcagtaaaagcaatatcaaacagtttttcctcggttggtacactgataacttcccaaggattaaaagttgtagagggaactttgctacaacctatacaagctaagactactattaacgcggcaaatataccttgccaccttttgaaaattgattgcatcagtattttttagtgtttgtgtgaatcaagggaacaggagtcaggagttaggagtcaggagttaggagtcaggaggtaggaggcaggaggtaggaggcaggagttttttattttggattttggattgtttttgttaactccaatctaaaatctggggtctaaaatctaaaattttcttccccagtcaccagtcaccagtcaccaatcaccaatcaccagtccccaatcaccagtccccaaaagggatattattgtagtccgtaaagactgataaaaaacaagaagccaagggctaaagcaccaaatattaagatattcttttgcgctggtgtcagtttatttacacccaatccataacctaagttttctttgaaaccagatgccgtacccgcaggaccgatattagcaaaagctaccttcttggcagtgcaaactggacacttccaattgattggcagttctgcaaacgctgttcccgctgggatatcatatttatcgtctcccttctgtggttcatatacataaccgcaggcgcgacactcatagcggtctaacgcctgagtctcaagagcttcttcagcttgttcactcatggctagattctcctagaggggaaatcttaaagatacgttacaaattatgacataattgttaaacttttctatcaatcctcaaactgaatcaaatactccactctgtctgtttcccagatttcaaaatacctggaaagatataatgtaaaaagaagttacagcttgatttccaccataatcagtaatcagtagatatttattgtgtttgtccttagcggttacgaatatcttctaggcttcttgatcctttgcagcctagttccagccctggcgctatcagcgtccaaacttctgagacctagtagctacagccctgaacggcgcaccacctatgaatccggtatggaaccctttggcggagcctggattcagttcaacattcgctactatatgtttgccttagtctttgttgtctttgacgtggagactgttttcctatacccttgggcggtagccttccaccgtttaggactattggcatttattgaagcattgatttttattgcgattctcgtaatcgcgttagtttacgcatggcgtaaaggagcattggaatggtcgtaaattctaatctaaccacccaggacaaagaacgaattattaaccccattgagcgtcctacggtaactcaagaactgtcagaaaacgtgattttaacgacagttgatgacctttacaactgggcgcggctttctagtttgtggcctttgttgtttggtacagcttgctgctttattgaatttgcggctttaattggctctcgttttgactttgaccgttttggtctaattccccgttctagcccccgtcaagccgatttaatcatcactgctggaacaattaccatgaagatggctcctcaattggtgcgtctttatgaacaaatgcccgaacccaagtatgtaatcgctatgggtgcttgtaccattacagggggtatgttcagcgttgactctcccagtgcagtacgcggagttgataagctgattcctgtagatgtgtacttacctggttgccctccccgtccagaagcgattattgatgcaattattaaattgcggaagaaaattgctaatgattcgatgcaagaacggggtcaaatcaaacaaacccaccgctattacagtaccacccacaatatgaagccagttcccgaaattttaactggtaagtatttacaatcagaaactcgctacaacccacccaaggaattaacagaagcgattggtatgcctgtaccacctgcgttgttgacatctaaacagaaggaggaagaaaagcgtggctgatgcagaatctcaagaatctaaaatagttcctgcgggtcaggtttcccagtggttaacagaaaatggttttgaccacgaatctttggcagctgatgtcaatggtgtagaaattattaaggttgcacctgagtttttacttcctaccgctacagctttgtatgcttatgggtttaattgtctccaatttcaaggcggtattgatttaggaccaggacaagatttagttagtgtttatcacttgatcaaggtgagtgataatgctgataagccagcagaggtaagaattaaggtgtttttgcctagagaaaatcccgttgttccttcagtgtattggatttggcgcactgctgactggcaagagcgcgagtcctacgatatgtttgggattatctatgaaggtcatcctaatttgaagcggattttgatgccggaagattgggtaggttggcctttacgtaaggattacatctcgcctgatttctatgagttgcaagacgcttattaggtagtgctaatctgtggtttacccctttccaatggtggagaggggtattgtttttttcggggttagcaaaaatcatgaggtgctatcaactggagtttaagttaatcagagacttagcgaaactatgaataatcttaggtaggggttgctgaataaagacaaaagctagatatattgaaggtttgaggctaataaacaagaggttgtcttaaaagttttcggcgaatataattcgctactacacaagcaaagtccacctgcgtggactaacgaaaaattaaggatttgaaacctgcgtaggcaggttttgtctgtgtagatgtgatttctaatcgcccaagttagacttttcaaacatcctcttaaagggtactttatcaaggtgcttgggagtatgacgttacaagtggtgatagggtattttatgttcctgatgaggaacaattaaaggttgttgtctattatgcggggaaacatcctaaacaagctcctgtaccataatttattgttcataaaaaagcaggaaatccattaatttatcttctatcatctgcgtttatctgtggtcatctgcgttcaattattcttgatatatcaaacatcctgcaaatcctttaatcctggatatcctgattctgacaaataatctctgattattaacacagataaacttaaaaaaataaaaattgcaataaaaataaaaataaaaataaaattttgtaaatcctctcatcttgtcaatacccattgataaatttgagaattgtaaagaatttggactttttgagaaaattgccatttaatgtaaaacagatgccatcatagctcaatcagagccaattggcgggcaatttacctaccagatacaacccagttggtaaatatcctctactggggcatctggtagcatgagaaattgccaatttaattaaatcaacctaacaataaagggaaatttggtaaaaagctgttaattaataactaggactttttgccaaagatgattttaatcctagacaaattgtgatgaatataactaatttcccgtggttgacgacgattattcttttaccaatagccgcgtcactgctcattcctatcatccccgataaggaaggtaaaaccatccgttggtatgccttaattgtcggtttgattgattttgccctcatcattgccgctttctacttgggttatgatttctctaaccctgacttacaattggtagaaagttattcttggctaccacaaatagatttgaagtggtccgtgggggctgatggtttatccatgcctctgattattttgacgggttttattaccactttagcggctttggcagcatggcctgttaccttcaaacccaggctattttactttttacttttagccatgtacggtggccaaattgccgtgtttgcagtccaggatatgcttttattcttcctggtgtgggaattggagttaattccggtttacctactgctggctatttggggtggtaaaaaacgccattatgcagcgacgaagtttattctctacaccgccggcggttcgctgtttattttgcttggttctttgacgatggcgttttatggtgataatgtcacctttgatatgcagtcactcgccctcaaagactacgccctcaatttacaactgttactatacgctggtttcttaattgcttacgctgttaagttacctatcatccctctgcacacttggctaccagatgcccacggggaagctaccgcacctgtgcatatgctattagcaggtattctgctgaaaatgggcggttatgccttaattcgcatgaatgcccaaatgttgcctgatgcccatgcttattttgccccggtgttggtaattttgggggtagtcaatattatctatgcggctttaacgtcttttgcccaacgtaacctgaagcggaaaattgcctactcttcaatatctcacatgggctttgttaccattgggatagcctcttttaccgatttaggtttaagtggtgcagttttacaaatggtttctcacgggttaataggtgcaagtttatttttcttggttggtgcaacttatgaccggacacacaccctgatgttagatgaaatgggtggtgttggtaagcggatgaagaagatttttgcgatgtttactacttgttcaatggcttctttagcattgccaggaatgagtggttttgtagcagaattaatggtgtttgtgggttttgccactagcgatgcttataaccctacatttaaagtcatcgttattttcttgatggcaattggtgtgattttaaccccaatttatttgctgtcaatgttgcgagaaattttctacggacaagaaaacgaagagttagtttctcaccaagctttaattgatgctgaacctcgtgaagtgtttatcattgcttgtttgttagttcctattattgggattggtttttatcccaaactgctaactcaaatgtacgattctactactgtacaattgacggcaagattacgggattctgttccaactttagctgctaagaaagcggtggaacaggtttctttaagtgcgcctgtgattggtgaatagttgttagttacaatttatcattagggtgggtttaaaacctgccctttttttagctttctattctggtagccagtcttcatctaacactaattctaattcataaagacattcttcgggaaatgtggaaatgattaatcctgtttgtttagctgcttgacgacgtgctttttcatagctttctattaattgttcttgaggataatttttgagactaggactatcttttatagctaattcaatttgagtgcgtgcatctgtgatagaatctaaccaactatcggaacgtcgttgaggttgatattgccatttaagtaggtgtaaaagtaggcgaatcagttgactagaaatagctcttttttcacttttacccaagtcggaaatctcctcaattaaatgttctttatctatttcttgccagcgattttctaataatagttttgcggtttcttccagccacatattgaagtcggtttgataagttacagtcatttttagtttacctcattaaaggtttttggaatctaattctaatgttttacctgcttgatcttctgctaatgctgctgctgcaagtttggcaagtacatcatgagattttgcaaatgcttgatcccaacgagtttcattttctatttcttcgaggatgagtaaggcaattctatcttgttcggtttcaggaagttgttttatttgtgcaatggctttttctagtaattgagtcatagctagtaagctggtgtaattaggtgttgttaattattgtactttagttaaaagttgttgggtgctgtatatatagtatcgaaatttacatttataaaaattgtttacactatttacaagtacttttgtactataatataataaatgttatattctcaatttttaaataggagtaaattgtatgtcaaatcatagcggtagctatatgttaaatgaagtgattacaatcttgagacgtgagcattgttttgatcatttggatcaagaaaagaagcaaaatctgattgaagaaattgtcaacttagctcgttatgaagatgattgtaattcgggggaaattttagaaggacatacagattattttcagatatgttattgttgtttggcaaaaactaatgatctggaatctggtctttgtgtaaaatgtaggtagttacataatatatcgctcttttttatctcacgcaaaatcatattaacttaatttaataaagtgtcaaaactcctaaatctgaattttctgcaaaggcttggatatcctctcaatgtaattgcaaaatttcctctatttgatttgttgaacaattaccacgtctcacccaaattactttaggtggatatccacgcagtatacttaattcattaaaatcagcatctctggtaacaattataaatttattttgttttgcaaattcccacagaattctatcatccgcttgatctaaacctaagagaaaaacgtgctgagagttggggtaaatagcagcgagtttatctactaaccggggtgatagattatgatcaaataataacttcatgcttgcaccatcaacatttgtctttctctatctgctgcatagctaagacaagctaaaatatctgcttgtgttaaataaggaaaatcatgcagtatttcctcataagtcatgccagatgcaaggtatgatagaacgtcatatactgtaattctcatcccccgaatacaaggtttacctcctcgttttcctggttcaatggtaattatattttgatactgcatattgtttaaaggggtaggttttgttttctattttagcgttagaggcgatcgctcttttttatctcacgcaaagacgtaaagaaggaaaggaagagttggcgaaaatgatacataacataaattaattagtagtttctacttgccattcttccgtagaaagttccgccgtttcgatagctttaatacaaaaagtattaatatctctagctgataagttcacattgacaaacaccccattatctaattttcttgtatctcgaaaatctttttcatctttactaataaaacgcggaaattgctcaataatatattcaaatttatcagcttctaaatcagctatcacatttaacgttgtttctaaaacatcacgccaacttttaacaggatattctttactaaaaattttcagttgtttgggagttgtaccagttaatttacttttggatggaatcataagattttcatccccaaagtaaggccaaatttgtaaaactatctcagctaaatctaaacttcttttttctatatcctctcttttccaattttctttattttcaaagtatttattgatttctaaatgactattaatcaatatttcttttttatcggcaaattccaaattatataattcaccattgtaagcggtaatagttagattacctaaagaatgaagtagtaaatcatgagttattccccaatcttctcctaaatgttcttgccaccatttatttatagtttgtggcataatatgttcaatctccagaccatccaaaatgacctgttctttatgattaaaagattcttcaatagattctaaaattaatctaccttttttagagcgcccagcaccgtataacttaacatccaataaacttttctgaaattctgtatctttgggataatcacgattttgtaaatctagttttaatctttccacaaaattagaatgagctaaattactttctttgctcacttgagaatatagcaccgaaaatattctatttaatccccttgtttgcacattacaaacaaatcggcgaataatgaaattttctaaaatctgcaaaacatcaagaaattctaattctgaaagtttattttcatcataatcatgataacaattaagtaaaaaaggataaacagtagctacttctaaacggttgattttttctagcaaccgacgaatttttaaattattttccttgactggatctaaaagttttgcataatattctgaaaatttatataaattttttaaataagacagagcatcactcgtactcattctatctttaatctcaaaataaacttcatctttcttaatttctacaccatcttttgttaaataatgcctgataaactctgttaaattatcatttagagtttcttgcattggtagccaatatttattataggcatcgtcttgattttctggattaattctcaagaaaaaataattacgaattaaatcagcttgtgttaatggttcacctttagcattgagactttcaaagactaaataaggattatcttctgtacttaaaacaacactaacgacagataaataactacaaattacttttttgagatcagaaaaatctaaattactttgtctaattttcttatcaaaaaatacataacattccgtaataccagaatgatttacatgatcttgtccattaattaaactatgaaaagattttctatctacctgtgtgggttgaagtttataataatctaaaccttttttatatggattaacaataatagtattatgaatttctgcggataactcatcatcaatatttttagctttatctcgcaaagcacacaataagataaaaatagtagttaaacgttgttgtccatcaattaatgaatatttacttacgccttcaggtatagtagaagttggcatagtgacgatagaacccataaaatgaggacgacgattatcactacgatatagttctaaaatatcattccataaagcttcccactgaaattttttccagctataagctctctgaaacaacgggacaacatactgtttattaccttcaatgatctcttgtagcttggtttctgatgcttgcatggttaatgtaacctaacttactcaacatttatcctcttagtataaaataatcctctataaatagcacaagatagcgtaacaaaattaaacatttctgccagggaataaattccctgtctaaaagcgaaagtcggttaaacccgactatgtttgtttgttattatcactctaattcatcaggattcacacctaaagcctttaacttttccgctaaaagttgcgtttttctcctttctgctgctaaagctgtttctgcttgttcagcacgttgtttttcctgttccaaaagttgagaaatttccagatatgaagaaaacttattcccatcaggacgataaatttgtaattcttcccctgataaatcaaacttaattcctaatctgggactaacccaattttccatttctgaaatgacatctaaaccatcttccgttcttaaccatcctctcaactgattattttgaggattataaatataatattcttctactccatatctttcataaaatatcaatttcctctccatttcggtttgagaattactaggagaaagaatttcaaaaactacctggggtgcaatattattttcttgccattgtaaataagaaccgcgtttaccttttggtcgtccaaatacaaccataacatcaggtgcattgactatataattttttccttcaatgggataccaaaataaatcacctgccacaaaaacatcagggttatctgcaaataaccaatctaaattttgttgaataactaatatccaacgaaactgttctgtattattagccattggttgtccatcactgtctgggtagatgacctctgatgtatttaagggtagaggttgagtaaccataactttaaattagttagttgtttactttaccgatatcttagcactaaataatagataccgtaatttttaataagagccagggaataaattccctgtctaaaagcaaaagtcggttaaaaccgactcataaaaaactttgttcttcctctttgcgtctttgcgtctttgcttgagaaaactactaaaaattctcatcatcaataaaaaaatccatcaaacttacttaacctcagacacagaaaaagccttatttgcttcagcataaatctttaaagcaaccgccatttgttgtttagcattatctccctgtgcttgaaaccaagccaaagtttcaggatcaacttcaatcataatttttacaggtgattgaggcattcgcaactgtgctttctcaaaaaactcatccgacaaaggaggaatatcagaagtatcaatttcctcatcactcatcgcatcaattctagcccaatctgtttttgatgtattgttcatagcgttttcgttcatgagaaattgcctttcttaatgaaataatcctaactatattcacatcaggttcagtgtagacaacaactataaccctaccatcaagtagtccaataccaatatatctttcttcaccataatcttgtcatttatcaatatagacaagcatcggtaaattaaaaattcggtaagcatcagcaaaatcaaaaccatgctttgtgatattactttggtttttacgctcatcccattcaaacttcataaactcaatctaccacaccaattgctaactctctcttcctctttgcgcctttgcgtctttgcgtgagaaaaaccctaaaaatcctcatcatcaataaaaaattccgcctcctcatcaaccccagacttcaactcacccaaaccccaaagagactgcaaaaccacgccaccaaccaaacccacagccaccgaaaaagccaacatcaaaccaaacggaacttgtatagattgaaaaaccaaaaactttaaagatacaggtgtagcattctgcacagaaattagtgcgatcgccaacacccaaccagctataactatagaaataaataaattcacaaacattttcataattttatatataaaaaaggagtcaggagttattaattttggattttggattttggattttggattttggattgtttttgtcaaatccaatctaaaatctaaaatctaaaatctaaaattttcttccccagtccccagtccccagtccccagtcacctatcctaacttagcaatttcagct

SEQ ID NO: 76 - DNA, 24981 bp, Sphaerospermopsis sp. LEGE 00249
  LEGE00249_94
caggttattttcctgtaagggcgaagcattcgggcgataaattatcaattttgatcacaggttattttcctgtaagggcgaagcattcgggcgataaattatcaattttgatcacaggttattttccgaatgcttcgcccctacttcgcccctacttcgcccctacgactcctgaattctgctgtactttgcgtagctgaattactacttaaaaagcccatgatcgcctaaaatttgctactcatgagctaaattaacttatttatgtgaaaactgcaaactaaagagctaaatgacctaattcttggaaaagagggggatattcaaaaaacaaaccaataattattcttcttcctcctcttcttcttcatattgttcaaaaatttcgtctatcagttcttctgctcgctcatcggaaatttttaatgcttcctgaagttcaaagagataatcttcttctgattcgggtatgtcttcttccattcccaggatcaaaatagctgtgatataggcagtttcacgataactcttttttgttaaggatgcgatcgcactaggaattaaattctctactttttcttcctctatcaaggtgttgacttttgctgttaacttatcaaagtcttcctcagagtaacttgcaaacagttcaataccttctaacatttctggtaaggggtattcttcgggggtaataataccttcatcctcaccagaagcggaaaaaagtccgataatgacgatcgccacttctggttctagtttaactggagttttgattttgcttttaaccaactcacttttagacatgatgatccttttgacagactattatttagattcccaaatcattgcataaaatcacagagactgttactttttttcatacatttgcacacagaagttatgtttttaacatcaaaaagattttagctaaactcaaaagctatatacccaatctagaaggtgattttcacacaatatccccgacttcttgcagaaatcagggatctgattctggttatatgacttacaacttattcccgcactcagcacagaaattatgactgggtgggttttttgtaccacaatggttgcagtaaactggctcaactgcggtttttggtgctggctttggtaaaccaaacatctgggcgttactcttaccaggcgctaccattggatagcagttttcatctttagtaacacgcacatctaccactacaggtccattgtgtgccagcatttccgcgattttatccgctaactcttctctggtattaatcaccatacctttaataccataagcctgtgccaagagttcaatatctggcatccctacttccatgttagagcaggaataacgctcaccgtaaaaggcttgttgccactggcgcaccattccctgccaaccgttatttaaaattacggtcttgacatttatcccatattgtgctaaagtccccagttcttgtaaacacatttggaaactagcatcaccactgatacagattacctcttcatcagggaaagccacctttgcacccatcgccgcaggtacaccaaaacccattgttcctaaacctgcactagagatccagcgtcttggtccattcttcaaaaattgggctgcccacatttgatgttgtcccacatcagtggtataaaatgcgttgggtgcttggcgaccaacttccacaattacctcttggggagaaatgctatcagcgtgatgaggtacaaccaaaggataatcctgtttccaacggttaattaaattcaaccattcttgattttggttaggtgttaccttgccgtttgcgctttgacatcgccgcaataaatcttgtaaaacgtttttgacatcaccgacaataggcacatcaggaacacggtttttacctacttctgctggatcaatatcaatgtgaataactttagcgtgggacgcaaactcatctaatttacctgttacccggtcatcaaatcttgcaccaacacaaatcagtaaatcacaatctgtcaccgcaaagttagcgtaagctgttccgtgcattcccaacattcccacagataggggatgatgttcatcaaatgcaccgatacccattaaggttgtggtgacagggatattaaataattctgctaattgtttaacttcttcgtgagcattagccgcgatcgcacccccacccacatacaataaaggacgacgactttcacgaattaactggatagctgcattaacttgtctggggttgcctttaactgtgggacgatatcctggtaacttcactgaacctggttctacaggcacataatcaaattcttctaaagccacatctttaggaacatctatcaaaacaggtccaggtctacccgtactagcaatgtgaaacgcttccgctacaattcgtgccatgtctttaggatcacgcactacataagaatgcttcacaatcggtagagtaatcccgtaaatatctgtctcctggaaagcatcagtaccaattgcagcccgtggtacttgtccagtgacaataatcatgggaatagaatccatgtaagcagttgcaatacccgttactaggttagttgctccaggaccagaagtaccaaaacatactcctaccttgccagttgcacgggcataaccatcagcagcatgggaagcaccttgttcgtgtctgacaagaatgtgtttaattgtaccagtttcctctactttgtaaaggtcatcataaatcggtagaattgccccaccgggataaccaaaaatgtactcaacaccatgacgaaggagactatctaacaaagcaaaaccgccagttgcccgttttggagttacaggggtagatttagagacagcagactgtttctgattttccgattgtgggagactgatttgagaagacgatggcacggttaacctcaaaatataactaaaagttaagccttagattttgtatttagaatctcattttaattgaaaaattccccttgatgctgaaataatcttgatttatcaacataaaggattactattttacaagttttagatcaaatcttgcaagactttccgggtattttgccaagtccagaaaccaatcaatactacagtgatactcataccaaaaagaactgttgccaagccaaaagcattaaccagcttggttgtaatcaataaaggtgcggacagcgcaatattaatggcatgattttgaaagccaaataccttaccgtgcattgctgggggtgtgtgttgttgaattaaggtttgcatcggcacgttaattaatgctgcacctaaacccaagaaaacacaaagtcctaacactaaaaataaattatgagtaacaataaacattcccagtgccaaggccataaacataaaaccaattaacggcaagggtttatgatgcagtttatgtccaaaatgtcccaaaattcctgcgcctaaaaccattcccacaccggcagcagcaacaaagaaactaaaatcagtttgttctaagttcaatctagcagctaatctaatagataattctaataatgccgcaaacacgcaatacaaagcgacaatttgtaacatcgcattccagactaagcggttttgttttagatattgccaaccttgtaaaaattcggtgataggattagctacggatgtttgcctatgttctgtaaaccgaattggcaacatgatgatagctgataacagatagaaaccacctactaatagttctttgccaaaatcagagtttaaatattccgcccagtctaaaattggctttcccacagcataaccaactatcaatgctcccatcatggtgctgctaaataaagcattagcggccattaaattctctcgttgcaccattaggggaatagtagcttgttccgctggggcaaaaaactgagttaccgaggagataccaaaattcagtgctaacaatattcctaactgcctgggcaagaaagctatacttaatgtcaacaagccccgcacgacatcagaacccaccataattagctttttgggcatcctatcaacaatcacaccaccagcagaaccgaaaaaaatcgctggtagggtaaaagccatatacatataaaagcgccctgtgccttctggtaaactggcaggtaagtattttttctctaacaaatcaatcattaaaatcaataaaaccttatctgctaactgggaaatgagttgcccaatccacaggagcataaaattacggttttttagcagtgcgccaaagccagtattaacagcagtcggttcagtgggaaacatcactaattgggaattgggaattgggaattgggaattgggaattgggaattgggaattgggaattgggaattgggaattgggaataaataattatctattcactgtcaccagtcaccagtcaccagtcaccagtcaccagtcccctgttattcataactttttaacaatatatgcaaaaactcagccgcattcagggatttttgggagtgggaaaaccgaattgatggatctgtccagttaccttgtactgtttggggcgatcgccacattgataaatgatcaactggtggatcggcataaaagttatcttccccaatacctaaaatagcagaactccaatgggtaaaataaccatgactcaggcgatgtatgggaaaatttccccataatggcacgccccagccatctatagctattaaggctttcacattaccaccttgaagttgccatgttgtagctgccgcgatcgcacctactacaccggcactaaaaccaatgaatataacaggggattctagcttattattcaggcgatcgcgcaaaaacagtaaaatatgaagtgctgataaagtgaaaatcccctctcccggaaaaaccagtatatttaataactgctgatcacctctctctacattggggttaaacaagctgctgacaaagctttgcgttaattctatttcatgaatacctggacaaataataatattcattagcttttatggttaaagatcaacaacctatggcatttgctcggttaattgtaagttaattgttaatttttactggttaattgtaaatttttcatgatcagatgtatatttttatgttcacatctatcctatccccctggatgggataataattaactaatatggcgaattatagggttatacccagtgaggatgtcgccatttcgcttatattgagggaattattgtggttgcaactccagaaaaaatgcaacatactcacgagcatctaccagtccatgatcgcatagctgtactgctcatgggttatggtgaagtcgagagctatgaagattttgccaattataatgaacaagctttaaatctacttactgccaaatttgcaccagtaccaacttggatttatcccactttagccaagattttagctatatttgatcgtcatgaatggggacatacccatcatgattttatctcaccccataatgccatttttgaacagcaacgggcaggaattgaacacgaattacaacataaatggggcggtggtgttcaagttttcaaagcttttaacttttgcgctccttttttaccgcaacaagttttagcagaaatcaaaaatcaaggctttgaaaaaatattgatctatcctttgttagtggtagattctatttttaccagtggtattgctattgaacaagttaataatgctttggctgaattagctgatggtgatgaacattgggtgaaaggaatgcgttatattccttctttctacaatgagccggaatatatcaatttaatggcgcaaatagtagaagagaaaatcaattctgacttagccaatgcctatttaccatcacaaattggtattgtgttgatgaatcatggatgtccacacaaagccaaaggttttacatcaggaattgatgaaagtcaagcactttacgaattagtgagagagaaattaattcaccgttatcctttaatttctgtcggttggttaaaccacgatacaccattaattgaatggactcaacccaatgccacccaagcagctaacaatctgattcaattaggtgcaaaagtggtaatgtttatgcccataggttttgccacagaaaatcatgaaaccttgttagatgtacatcacattattcatgatttagaaaaacagcattctggtgtggactatttacaaatggcttgtgtaaatgatgatccccgctttttggatatggctgcggaatgggcaaatattcacattcaagaattaatggcagcagaaggtaaggaagttaatgtacagttagctatacatcatcatcaccatcattaggtgattggggactggggacacttcgacaagctcagtgcatcgctggggactggggactgggtaattggtaatgggtaattggtgacaggtgaaagattaatttttgtctgtcactttttcgtgtaagctgtaatttttatcgggaattagttacaatataggtattagttttgggaaaagatgatgatacaaactaatatataggactcctatttgattaatgaatagattattattagatactcatgcttttatatggtttgtctcgaatgatgtcaccctaccagggttttagttagtcgtgatgcggcttttgatgcctattctattcagcgtttgtggtcatgaagaaggctaatactcccatttattgaaaattttacttgcttcaattcacaaaaatactctactcactctaataaccaatcaaacaattcttttacagtcagatgaaaatctttggcaaattctggtactggcaaacgtgcatttggttgatcataaaatgccgttggttgatctggaaaataaacaaatatagattgttcttgtggatcaattagccagcccatctgagttccataattgagacagtgtaaaatatttttaataactttagtttggctttgatcaggtgagagaatttcaatagtccaatctggagcgatcgcaaaaacattggcaactctgccattttcctgacggggaattttatcccaacagaagacagaaatatcaggtacaattgaacgtccaccaaaagtacaacgcaattctgaaaaagctctggcaatcttttgaggttttaatattaaattaattgcaggtgataactcagtttgaattacactatgttctccttgtggcattggtttttggatgatgctcccatcaatatattcgcttgcaggttcggtttctggcagttctaggaattgttctagggtgataatttgagcaggtgtttgtaccatttgcaggtttccttattttattgatgagggagaataaattgtaaagatgagttttgttttgtgtcaacaatcaacggttcgactccgctcaccgaccacggttcgactccgctcaccgaccacggttcgactcccctcaccgaccacggttcgactcccctcaccgaccacggtcaacggtcaacaatcatagaagttatcatcaaatcaaccttacttaaacttttatgactaaatggtttaacaccgcaggcccttgtaaaccggatatccactataccctacccaccaccgaacggttaccccaattaaaacgcctgattgaccaacaaaattactttgtcatccatgcacccagacaaacaggtaaaaccactgccatgcttaccctagcacaggaattaacagctagtggtaaatataccgccgttatggtatccgcagaagtaggctctgcttttcccgatcagccagaagtagcagaaagaaggattttagatgcttggcaagatgctattgactgttggctaccaacagaattacaaccacctttcttaactaatggtaatccacctcaacgtattggctctttcctcaaatcctgggcggaaacttctcagcgccccttggtggtgtttattgatgaaattgactctctgcaaaatcaaactttaattactgttttaagacagttaagggacggtttcccccgtcgtccccagagtttccctcaatgtgtggctttaattgggatgcgggatgtacgtgattataaggtagctgccggtggtagtgataggttaaatacctctagcccctttaatatcaaggtggaatctataactttaagtaattttactttagaagatgtaagtaatctatacaaacaacacactcaagccacagggcaaatatttacccccgaagccattaaccacgcttactatttaacccagggtcaaccttggttagttaatgcgatcgcccgtcaagttacagaatacttagcagaagatgtaaatatccccatcacggtagatttaattaatcaagctaaagatatcttaattcaaaggcaagacacccatttagatagtttagcagagcgattacgggaagatagggtaaaagccattatagaacctattttatctggggaagaattacccaacacaccggaagacgatcgccgttatctgttagatttaggtttagtgattcgcagtcaagaaggtgggttaaaggtagctaaccccatttatcaagaagtcatccccaaggtgttatcccagggtactcaagatagtttaccgatgattcaacctagttggttaacacccacaggggaattaaacccccaaattctattagaaacttttttagacttttggcgacaacacggggaaccattattcaaaagcactccctacccagaaatagccccccacttagtattaatggcatttttacaccgtgtggttaatggtggtggcagcttagaacgggaatacgccataggctctggcagaatggatatatgtctgcgttatggggatgtagtcttagggatggaattaaaggtatggaaacagggtaaacccgaccccttacccaaagcattggtacaattagataaatatttatcaggattaaatttagatacaggatggttagtcatatttgaccgtcgccctgacttaccccccatcagcgatcgcactaccacggaaatagctatgagtccccaagggagaaatattacagtcattcgggggtaggtttggattttttgatggtcaacggttcgactccgctcaccgaccacggttcgactccgctcaccgaccacggttcgactccgctcaccgaccacggttcgactccgctcaccgaccacggttcgactccgctcaccgaccacggttcgactccgctcaccgaccacggttcgactccgctcaccgaccacggttcgactccgctcaccgaccacggttcgactccgctcaccgaccacggttcgactccgctcaccgaccactgggggtaagatccccgacttcttaaataattggcataatctcatataatttgtccagaagtcggggatctgagtgacaacgaagatcatgtacttgattatcttgacggaatgcggtcgccaagcgttgctacaagcagatcgcgggtgagtaagatccccgacttcttaaataattggcataatctcatataatttgtccagaagtcggggatctgagaagcgctgctgctcagtgcatccggggaataaattaagcgtctcatagccaaagtccactaaaagtggactggtaggttacaaaaaatactctaggcaatgattgttagccctatgtattatgttatatttaacacatagtcggatttatccgacttaagctattagacgggggtttctaacccccggctcccggtggtcgtagctcttaacccctgacccgtcaaccgtcaacagtcaaccgtcaacaaccctcacaagattatggtcagaagtgggggatatgaggattcaccccacggacaatatccccgacttctatagagatttatggttacctgacaagattatggtcagaagtcggggatatgaggattaacgcccccgccaaatcttgatggtaccatccccactcccagagactagggttttaccatcggggctgaaggctactgagtaaaccgactctgaatgtccggtgagggtggcgattgacttgccggtggcgacatcccacagtttgatggtgttatcgtgactcccaaaagctaaggttttaccatcggggctgaaggctactgaaataaccaaagttgaatgtcccgtgagggtggcgatttctctcccggtggcgacatcccacagtttgatggtgttatcaaaactcccagaagctaaggttttaccatcgggactgaaggctactgaactaaccccatctgaatgtccggtgagggtggcgattgacttgccggtggggacatcccacagtttgatggtgttatcaaaactcccagaagctaaggttttaccatcgggactgaaggctactgaaataaccctagatgaatgtccggtgagggtggcgattgacttgccggtggcgacatcccacagtttgatggtgttatccaaactcccagaggctaaagttttaccatcggggctgaaggctactgaattaacccactctgaatgtccggtgagggtggcgattgacttgccggtggcgacatcccacagtttgatggtatcatccccactcccagaagctaaggttttaccatcggggctgaaggctactgaattaaccaaatatgaatgtccggtgagggtggcgattgacttgccggtggcgacatcccacagtttgatggtgttatcataactcccagaagctaaggtttgaccatcggggctgaaagctactgaacgaaccaagcttgaatgtcccgtgagggtgttaactaaggtagaacttgaccagggaaccacccgcgcccgtcgggagaggtcagggattttctctatagggataccctgcaccccttgtatttttgtggagtccagttccgatttaccatagatgccaatgacaaacccccgctggtcaaaaattggtccgccactgactcccttttggggtttaccggacataattaagtcgtatccttgcttttctccctgactgcgggatgtcagttgatcttctgtaaacttatactgtctaggattggtatttttggaggcattggcgggaaacccggcataatataggggagaaccattgttgactgtgcgggaatctgctaccgctgccactctatactctttagtgctggtgaaagtaatgatggctaaatctaatcctcgtaggcgctcaattttgtcaatctcgtggctttctccatccccagtaattatctcgtaatccccagtaattacctgattgtcccctggctttttcacaacatgaaaggcagtcaggacagtataaacattaccttgacgattaatcattaccccagaacctacaccatccaagccaccgatattgacggtgatttgtcgggcaatgttgttaatttcggctgctggcaccctgggtattgtcactgggttaacggctaggactggttgtaaatacactactgctgctgtggtagcgcctaaaattactgctagttcgggggtaaatttcatagataatctatcacctgaaggtaaactggccagggaaaaaatcactgacgggaataccccaactatattgaataatggtggctacatccctggggttaacagaagagccatcggcaaatacataggaattaccccaaataggttgggcatgaagtccgttaatacctactacttcgcctctacagttcaacaatggtccaccgctcatacctttaattacatcactggtgtaaccaatgcggtatcccccctctaggggtttgggtaatatctgggtgatttcaccgggtttaatggctaagttgccatcagccggggttttacgtctggtttgtccaggggcttctggagacagggggaaaccagcggccatgacaaagcctgaacggggagcaacatttgccatggtggcagggttgtaatgtcccctatggtatttaaactgtaacagggctaaatctttaccaaggaaatgggttttatcctctacagcggtaacggtgtgatataaacgtcttcggctgttcaactcctgggataagtcttcaccctcaatgtattgttgcactaaatatttatattcatattgatattcatattgatattcaaagtcagtattttccccaaaggagggagcggtgaagctgaaataatcgtataaagagggaatttgtccggttttatcccctaaagattctaaaacccgcgcctcccgttcaaaggctttttcaatagcttgttttatcgctgctttttgttcgggtgttttgtctgcacctaaatttttaggattaatatacaatcttttaatcacacaataatcttgattcaagcgtcctaagttaacagcttgaaaagtttccccaaaccctcctttacccaggggctttatgggttgataccgcccctttgaacttgatagaatcaggggcattccacaggcttgacaggtggggtcattctcttctaagtggttttcaggtttggggcagcctagcctggtacaataatatgcttggggaggcatggtagtgaggttgggtaatattcatagttactaaaaatataatcacattatagttagttaatgaaccgctgtataaaacctactgaaatataggactaatataggactcctatttgattattgaaaaaaactccatacaccaaaattctctaaaagcctcttgcctcttgccttctttcccaatcaccaatcaccaatcaccaatcacccatcaccaatcacccatcacccatcacccatcacccatcacccatcaccaatcacccatcaccaatcaccaatcaccaatcaccaatcaccaatcaccaatcaccaatcaccaatcaccaatcacccatcacccatcacccatcacccatcacccatcaccaatcaccaatcaccaatcaccaatcacccatcacccattaacaatttctcatagctcgaagttaaactagataagaaaacagtaatttccagttattgctatttctgtaagaagaataggcataaaaccaaaaattcgcttatgccaaaattaaaagggtaaatattatgacaaaagttgctaaaaaggcattgaacaaacagcatcaaacaaagcgagtagcttggactggggcattagcagccgctatgatcatgttgccgggaatgtttgggggtagtcccgtcttggcacaaaaagcagaacgtaactctttatcttacggggaattgctgcaaaaaaccgagcaagggctggttaaaagagtcgaaattgatgaaaccgaacaaatagctaaagtttatttagcagaccaaaaacccgatacaccacctatagcggtacggcttttagatcaaaactcggagttaataaacaaactcaaagaaaaaaatgttgagtttggtcaggtttcctctgctaatagtagagcagccgtaggattattaatcaacctgatgtggattttaccactggtggcgttaatgctgttgttcctgcgccgttctgccaatgcttctaaccaagctttgaattttggtaaatctcgcgctcggtttcaaatggaagcgaaaaccggagtaaaatttgatgatgtggcgggaattgaagaagccaaggaagaattacaggaagtagttacttttttgaaacaaccagaaaaatttaccgcagtgggggcgaaaattcccaaaggcgtgctgttagttggacccccaggtacaggtaaaactttactagcaaaagcgatcgccggtgaagctgctgtaccatttttcagtatttccggttcagaatttgtagaaatgtttgtgggtgtgggtgcttcccgtgtccgtgacttgttcaaaaaagccaaagataacgctccttgtattatctttatagatgaaattgatgcagtaggtagacagcggggtgcaggtatcggtggtggtaatgatgagagagagcaaaccttaaaccaactattaacagaaatggatggttttgaaggtaacacaggtattattattattgccgctaccaaccgtcctgatgtcttagattcagccttgttgcgtcctggtcgttttgatagacaagttattgtcgatgcaccagacttaaaaggacgtttggaaatcttgcaagttcatgcacggaataagaaattagatccgagtgtgtccttagatgcgatcgcccgacggactcctggttttaccggtgcagacttagctaacctcctcaatgaagcagctattctcacagctagaagacgcaaagaagcaattaccattttagaaatagatgatgctgtagatcgggtagttgcgggaatggagggtactgctttagtagacagtaaaaacaaacgtttaattgcttaccatgaagtgggacacgctttaataggtacattggttaaagaccatgatccagtccaaaaagttaccctcattccccggggacaagcattaggtttaacttggtttacacccaatgaagaccaaggtttaatttcccgttcccaaattttagcccgaattatggcagctttaggcggtcgtgcggctgaggaaatagtgtttggcaaaccggaagttaccacaggtgcgggtaatgatttgcaacaagtgacaaacatggccagacaaatggtaacaaggtttgggatgtctgatttaggtccattatccttggaaagtcaaaataatagtgatatatttttgggacgtgactggggaaataaatcagaatattctgaagaaattgctggtaaaattgatgctcaagtcagagagattgttagcaattgttatgtgaaggtaaaagaattactgcaagaaaaccgcatgattatggagcgtttagttgatatgttagcggaagaagaaaccattgatggagatgttttccgcaaaattgtagaagagaatattcaagatcgggtgcaagatcaaaagttagctgtttatcattagacatctggtggaggagatcaaggagtcaggagttcaagaatatcaaggagttttttgtatttggaaacgaggtaaaaaccaacaaagtgcaaggttttcctactcatagtttccaaaaccttgcacctattttctttgttatcaccctcaaactctttattcatagtgggtttcagtttattcagcaaaccctaagtaggggttgctgagaaagtctttccgtgagggcataggagtcaggagtcaggagtcaggagtcaggaggagattggaaaatttctttgccatctcttgaaatcccaaaaaatgcacactttttccggtatacccttcaaaacccttgcactaatttctgtgtttatcagcctctaacctttgatatatcaaggttttaggtttattcagcaaaccctaagtattaagttatggggaattgggaattgggaattgggaaaatacagcacttcccggtgttatgaggtacagagatgaatcataaaactcttgtggtgcgggcatacttcgacaagctcagtacaagtcttgcccgctactggtgtacttcacttatatgaaatctgctgtaaaatcctttcttcctgactcctgactcttgactcctgactcctgactcctgactcctgtgataaaaaaaagacaggcatcttgcctgtcccacaaatcattgtttagtaaagaatttagaaattcatctcagcagcttggactttttccacctgctttttcttcagcactaacataacttgtgccaacatcactaaacagataaaggcgatcaaacctgtgactctgttggggttttgtaagacgatttctgtatctttctgaccaaaaccaccgacgttggggttattggttaaagcgtcaccagatgcaactgtttgtccttcagaaacaatcagttctggacctgcgggaacggtatcgttaacaacttcaccgctgtcggttttgatgctaactacatacttaacgttaccgtcttcatcttctgttttggcaatcttgctgattgtaccagcagcggaagcgttgtaaacgttgttattgctcttttcacctgtggggtaaacttgtccacgtcctctgttaccacctacatgaacggcatatttgccaaagtagatatttttgtcggtagcagggttaggtgaaagcacagggaagacgatttcttgatgttcttctcctggtaagggtccaactatcaccacgttttcctggtcttctctgtaggtttggaagtaaacatcgcctacttcttccttcatttcttcaggaatgcggtcttctggtgcaattttgaagccttcgggtaacatcaatacagcaccgacgtttaaaccgactttagaaccatcagcacctacttgctgtacgttggtatcgtaggggattttgacgatcgctttaaatacggtgtcaggtaatactgattggggtacttctacttctgtgttttttgctgctaggtgacagttagcgcaaacaatccttcctgtggcttcgcggggtgtttcaggagcggtttcctgcgcccagaagggataagcagcagctgtttgggggtgagcaatatcgctggtgaagaaaaatgtcacagtagcgatcgctatcagtaatgtatttaacattactttagcagcgcgggttaacctcgctggtgtacgggggtttctcatctctataaagtcagttgtcagtggtcagttgtcagttgtcattgttcagcattaaagctgaaccattacatggtttaagcccaccaaggttcttcaccagtgcggaagtcggtttctgtccaaggggtcaaaacgattttgtcatcgttgacattcgcatgagctaaagctaaagacctgggtgcaggtccgcggaccactttaccagtagcatcgtactgggaaccgtgacaagggcatttaaacttgttctctgctacgttccaaggaacaacacaacctaagtgggtgcaaatagcgttaatgccatagtctgtgatcgcttctttgctttctaccacaatataggtaggatctcccttgagtccttggacaagggtgcgatcgcctacgttatgactgctgagaaacttactaacactaacatcgttacccagttcatcttttgctactgtaccaccaccagcaccaccactggcgggggggataaagtagttaacaacaggatacaatacaccagccgctactccggtgacagtcccaaaagtcagcaggttcatgaactgacgacgacccatatcgggtacgtccattgattcagaaaattgagccatagtctacgcgctctttgtgtaatttgttcagcaattttgacaagagtggtagcaactagcctcacactttgcctgagtcgaaatgctaacgcccccagtgatgccatacttcttggtaagaagacctatctagcattaccttctgttagcattacatttctttatatccttatcatagtttcaaaaagcatagacaaatatctcatgctttctgtttgctgggaatcaccccaacaggacttactagaacaccctctatctctagtctaaaagctgttgggactactttaaagaaaatattttgcgggttctcttttttcagttctgattggattagctactcttgagaatgttttactttgtctgatttataggatttcctgtcacacaggagctatggtcagatcaattctgactctccccattctcagagccggactttcaccacttctcaaggatctacgcttcttgaactcaagactaaatatatcacattcacatcttgcatcacagatgcagacaaaacatgataatatttctgtactataaatattaatattttgagtaagtaagtcggctctaaatgtaaaatctaaatgagagcagccatgatctcgttaagtcggtgttgatttttttttagacgtgtaacaatcagatgttacgcagctaaacttgataatcctaatatagttaagtcttgtgctgcggtcatattgctcgctagacttatccaaattaaatgaaaaacagtttatctgactatgtaattcacttgcatggcatttaactaaaataaacaatacaacaataaatcttaaagcattatgactggcaaggaattacgtcaactgttaattgataaatggggatattcctacgatgtccagttccgcaggacgcaaggaaagatatttctgcaaattatgtggaaatatcttgaacaagcttcattccctttaagcgaaccagaatatcaagaacatctggatagcatcgctaattatctcaacgctttgggtggaacgagtcaagtacaaacttttgttgaacaaactaaagagcgtccccgattgggtaaagctgtaagtattcctcttgacttgggcgatcgcgcatctgaatggatagtgtaggttgtgactggtgactggggacagataatatttttatatgaaaatatagcatttaccaagctagtgaggtacagagttttttatcttagggaattgggaattgggaattgggaacagtaaataaattagggtgtacctcatgagactgggaaacgctatgtcatgtcaaaaaagtcaagatgggaacataagaattaaaattgatcaatccatttgcagaaaggaaaaaagtttgggtacattggggaaatcatcatcatttaagaattacccgaatttttaaatatttctgtttattaggtttaaaagaatatgctcaggcattttttaaatgtttagaggaaatatatcatctagaaaaaggtgaaattactaaacttacattttctcattggcaagatgcaataaatagttaagaataagtagattgtaattcatgcaattttttcgactaatctacatatctaatgtttttgaagtacaattaagtaaacacaattctaacaagagattttcaagtggaaacatctaaacatctgcctcttgttttttttagatacaaatgttatcgctgcttacttacgtggtgagtcacctagttctgaactattctctccagcagtgttgacacaagtgcggttagcaattaatccagtagtattacaggagctttttttcttggtagagtccagtaaaaacccagaaattctggatgaacttcaagaagaagttaatgtgatacctgtaaatttacagaaagctgaggaatatctcaagtatgcagcagaccttcgtaaccgtatagctcattctaatgatgttttaattcttagtagtgctgctgaatatgactatttagttacttatgataaagcattaagtaaagcattaggttctttatcaacgagtaagcctcaaatagttacacctgaacaattattatctgaattgggaactaaggtgtgaaggtttatattgatacgggtgtttttattgactatctcagtccacaagcgatcgccccacatttcccccatattttctaaattcaatgataatgataaaaattttcaataagctttagtattttttcataattacagcatgacgatttctctgataaaagccgaatttttcaggctttttaactggaaagtgatcaaaaagcagtcagcttgactaattgatcaggttacgagaaactataggttgatggatgtaactgctaccccaaataataactttcgttaagattttgagatatatatttttaaagatggaacattatgaacaaatggcaacttttgtttctgtgttctttcagcaatagaaaactaactccgctaaagcagttaagtccaaggatactattgagattggcattcagagaatggaaacactagaatttataatttatcccgacggtcgagtacaagagaaagtcactggtatagtgggatcttcttgtgcggaggtaacagcagccatagaagcccaactgggaaaagtggtaaatcagcagcccacctcagaatttttcgccaacaaagctacacaggaatcaagtgtagtcaatacccaaactgcttttagcgaatggtaagttttccaactcgtctactttcattgattacaaaccgccatgtcacactttagccaaattaaaactcaaatccgcaaccttgaatccttacaagatgcactttccgacttaggagtagactggaaaccaggacctcgtgaagtgcgtggttatcgtggtcaaacccatccagccgaagttaccattgaacaggaaaatggttatgacatcggttttagatggaatggtcaggaatacgaattggtagctgacttacaatattggcagcaaaatttatctgtagatggatttttgcgccaagtcacccaacgttatgcttaccaaacagtgatgaaagaaactgccaaagttggtttccaagttgctgaagaacagaaaaatgcagatggttctattcgtttagtagtacaacgctggagtgcgtaatgtctcaattgcaaccgttcccagaagatttagataataatctagacaataatccttccggtttagagccagaattaggcggttttttgcgagatgaaccagaaagttctggttttgagccggaactgggcggtttgctacgacagaaaggtgtttatgtcgatgaaattacctgtataggttgtaaacactgcgcccatgtcgctaggaatacattttatattgaacctgattatgggcgatcgcgtgtaattcgccaagatggcgactcagaagaggtaatacaagaagctatagatacctgtcctgtagactgtattcactgggttgattatacagaactgagaaacctggaggaagaccgcagatatcaggttattcctgtagtgggttatccggtggatcatgcggtagctaccacagaaaaacgtcgtaaaaagcagagattagcaaaaaatcaataatatagcaggagtcaggagtcaggatttcagaattctgattacttatatcaattcaatatattgaattgctactgcctagagcgatcgctgcattttgtccaccaaaaccaaaactcaagcagagcagtttttgtatttctgtatttcttactgttgtcacaaaatttaaatcaaattctggttgttgcaatcccacagcaggaggtaatattttatgctttaaactcaaaagcgaaaatgctacacctaaagcccccgatgctcctagtgtatgacctgtagagccttttgtagaactaatagctacttttggcggaaataaagactgtataattttgctctctattcggtcgttgagaatcgtagctgtaccatgagcatgaatgtagtctatatctgcgggtgttaaattactgcgttctaaacattgcttgatagcagcgatcgcactctttccttctgattccggctgaataccatgaaacgcatctgctgtcaagccaaaacccagaatttccccataaatattttctgggttgatttggcgttgttttgccgactccgcagattccagcacaaacacagcaccaccttcacctaatactaaaccttcccggtgtaaatcaaaaggataagcgcctgtttttgctaaagcccccatttgctgaaatccacagatggtcaggggtgtaataggtgcttccactgcaccagcgatcgcccgttgacattgaccgctttgaattaacatagcagcttgggaaattgcccaaattcccgtagcgcaggccgccattggtgctaaaactggaccacaagacccgatttgtctggctacagcgatcgcattcatcagtggtaaagtatccaaccaattttccagatttaataattctcggttggtatcttgaccatacatttgctgtgcaaacttctcccaagacgcttgatagctacgactagaactaattaccacagcacaatcaggcaaagacgctactaattcagcattttgtaaagcagaataaacaaccatctgagtgagggtactcaaatcagaaggttgttgattaattaaacctagaggaattttccccagttctggaaatggttgatgtaatttaattcccgtttttaagcatagtaaattttgccagctatcttccaagctgttacccaaagcagaaactaaaccaataccagtaacaacaaccctaaccaattttagattttagattttagattttaaattaggagtcaggagtcaggagtcaggagttcaaggagtcagaagttattaattttgacttttgacttgatttattccctattccctctattcaataatggacaattaacaattaacaattgacaattacctctcccttaaaatcagaagatttcaaaagccgaattttggctttttccccctttaaaggggaggttttaaacctggaataaaacaattatcaattgtcaattgtcaattatcaattgataactactgaggaactttcaagttttcagcacctttaactactttggcagaatcaattttatcgccttcctgaattttattaactacatcaaaaccatcggttacataaccaaaaaccgcgtagttaccatctaaaaagcccagatccgctagagcaaaataaaactgagaagaagcagaatcaggcatttgggatcttgccattgctacagcaccaagtttgtgaatcaaaacaggcttttgagttattgtttgaccgtaaactggttgctctgcaccttcaggcttaatttctaagggtatacggcgttcagttttcagttttggatctatataaccaccagttccccacagttgcggggaagtattggaatctttactttgaggatcaccaccttgaaccacaaatggctgaggttcacgcacaactcgatggaataccaaaccgtcgtaaacgcctttttcgactaaatcaacaaagtttcccgcagtaatgggagcattatcaccatcgacttcaatggtaattggtgatcctttaactgtcatcactacagtagccttaccttcgagacgtggtaaattatttattccgggaacactctgattatttttgtttgatgagatttttgcttcttcagttgacttggcgcttgtctcagttgccttggaggtagctgtagaattgggagatgtactagaagcgactggatcagccgaacatccagtcaacatcaaaccaccaatcatcaacagaaggactaaaaattgtgaaaattttaaccgcattgaaagttacttactcaaccaaagtatcttagcaattttggattttagaatggtgattggggactggggacacttcgacaagctcagtgcatcgctggggattggggactggggactggggagaaaaattaagtcaaaagtcaaaattaaagaacttctgactaatccctatttctttcttactgtcacctgtcacctgtcacctgtcacctgactcctgatccaaaatccaaaatccaaaatccaaaatctagagtccttccaagggtacacccaaaaagcgagctaactgagcgccttgagtttctaactcagccaaagataaaggttgacctacccgtgtcaggggaatatcccttcttcccttgactttcagataaagtgcgcgttgaggatttagaccttctttaatagatatacgtacagattgtatatcttggatgcggctttcaatctcaatttggcggtttttcccaggaaacccccaacgaaagattttgaatttgccagtttcctggttaaattcgttgtaaccgccgcctacatcccataaaataactagccacaggtacaaggccaacagtacaccagctatgccatataatcccatcaccaatccttgagggacaaataccagttgagtgggatcggtgacaatgagtaaattgactttgagatagctggaaatgccagccaataaaaagcccgatgctcctaaactaacaatagttgcccaccagtagttacttaaccgacgagaaccgagaacattttgatgcaggaggcgatcgcttttattaatccttgttgatgccgtcattttagctaccttagaccgttatatattctctgtgaactggggactggctaacctgggtaatgagacaggtatggatctagattttaacttcattcacccaaacctgaaagatatattttctccagcatcagcttaaatctttttatagaaattaacgctatcagcttgtagtagcaggactttcactgtgtggtttgatattgattcttctactggagattttaaaggattttaccattgtcctgatcaaactcctgaatcatttccatcctatctagctgcttattatcatgctaaatttatgttattcagataatgtatatgaaaatttataagttttatgagaaaagttgtgtcattttgttaaaataaggacggttaagtttttccgccacgctccaaaactcaaactcaaaggttttcagcccattttcttataatatttgactattttgactatatttttgtgattcaaaaccaaataccaaattaacttgcgtatctccagcgcaaaccatgaagaatgtgataagttaagaatcgttaagttaccgccaaccaaatgacttggtgatggtaacagatagtggcataattatgagaaatgcccaattaatcaagcggtaaattctcagagtcttaactgctaatcagtagctaagagtgtcaaaaaaacgttaaattcctcctggcagtggctaaggaaaaaaacctccaaaagcatcctgccttaaaaacgtcgcaattttagtaaacaagaggattttagttctcatgaccatagcagttggacgcgccccgtcaagagggtggtttgacgtactagacgactggttaaagcgcgatcgcttcgtattcgtaggttggtcaggtgttttattattcccctgtgcctt

SEQ ID NO: 77 - DNA, 24116 bp, Sphaerospermopsis sp. LEGE 00249
  LEGE00249_95
tcctgtaagggcgaagcattcgggcgataaattatcaatttttatcacaggttattttcctgtaagggcgaagcattcgggcgataaattatcaatttttatcacaggttattttcctgtaagggcgaagcattcgggcgataaattatcaatttttatcacaggttattttcctgtaagggcgaagcattcgggcgataaattatcaatttttatcacaggttattttcctgtaagggcgaagcattcgggcgataaattatcaatttttatcacaggttattttcctgtaagggcgaagcattcgggcgataaattatcaatttttatcacaggttattttcctgtaagggcgaagcattcgggcgataaattatcaatttttatcacaggttattttccgaatgcttcgcccctacttcgcccctacttcgcccctacttcgcccctacttcgcccctacttcgcccctaggactcctgactcctatgccctcatgaaaagactttctcagcaacccctaatttatgatttcaggacttacgcagcatagaacggaagtaggggtaattcatgaattacccctaaacaagaatcaagttttgagttcaatcttgcgtaagtcctaatttgtagacaagatcaaaaaagaagtcggggatctgatggttcaaactataaaattacactataaaattaaagtttccagcctagcttgtacttcttctattaaatcctgtggcacactttctacaaatttgacttttctagctctccaatctaatgttttaatttggtcagctaaaacgactccttttgtttgcattccctcaaccagtggaacttcaaaactcagcccttttcggttgctaagtcagacagaattaaacctttagaagggaaaatacagttatttttacaacttggggctacagttggtattttaattgactctgataatttgacagttacagtttatcgacttcatcaagcacctgtgatattagaaaatcaggatatcctcaccataccgaaattgctgcctggttgggaactttcagtgtcagaactttggccgcctgagtttgagtaatttatgtatattttctgcaacatatacacataatcaataaatgtcagctagtatcataatcgacttaactattaagatgtattaccatgactaactctaactcggaactgtgggataaaattcgtaaataatttgatagtgcgccttatccaaatcgccctctttatgaatctcctaaagatgatgttaatgctctctatattcataatatcattacttcctattatttgagaaatcagaaagttatagacactaaagataaagttattttagatgctggatgtggtactggttacaaatcattaatgttagcagaagctaatcctggcgcaaagattgtgggtgttgatatatcagaggagtcagttaaactggcacggcaaagattagaatatcatggttttgacaatgctgaatttcatgttttatctatttatgatttaccagatatcaactatcaatttgattatattaattgtgatgaagttctctataaatagtcagatgaggagcaaaaacattccaaactccagcaccataatcatcttctgatgatactttgcgagagcctacattacatattgtgatctgaacttgttcaagaagaccttgctgtttcagggtttgcacaaaaatagacataataattttttgggttgagtaatggatgcttttaagcgtaaatagtcgtaatacttaaacttaaacttttgtattatatatcgtacatcggtgtagtcagtacaaaatcgaacctgtatttagtcatgtaagctttacttgtttacatctaatttatgtcagtgttgatactctttgcttcaagaacaaaattaattagaatataaaattatttaactcttttcaactcgaataatatacaggtaaagtattgctaaataaaggttttagcccattttcatcactgttgactagatggtaaaaaatttttttgctagaggtgatatgaaactgatcagatgtgggtaagttcttagcatagagaaacaaacaacactccaccccaaggaaaactactatgaaaactgaactgaaagcaaaattcttacaacacatcctgggtaaaaagaaagaaaacgaaggtttcaccctgattgaattattagttgttatcatcatcattggtattctatctgctattgctctaccttccttcttgaaccaagcagcaaaagcaaaacaatctgaagctaaaacctatgtaggttcagtaaacagagcgcaacagtctttccgtattgaaaatacacagtttgctagtaatattgatcagcttcaaattggtattcccacatccactgactactatagctacactcttggagcagctgttaatactacgactgttctagcatctgctaaagatcctacttctcttaaaggcttttctggtggtgtcagcattctcaccagtggtcaaactgatgctgtttcttgtcagacaaacggagtacaatctcaaactcccgttgttgtaccaacactgactaacacttctacatcttgtcctacaaacatgagtactatgaaataaagtttaatgctttgtggttaaaaatgctagatggattaaagtacatctggcattttttgatatgatgttccaaatgtttactttgtaggggttaactataggttaatgcctacattattatttgaaataaagttaaaaatatactcacacaatttattgtaaacggatttcaaggttgttaatgatgactatcctatcagataatcaagtttctttaactcaaactttgttaagtattccagaatatgaacaaaatattagtgaaaatcccaaggaagttgctaattattggtatttagggttagccttattattccaaggaagagaagaagaagcacaaatcacctggatgactccctttctcgaattagcagaacaatcggaatcatggcttgtagaattaaccacaattttattagattatgctgagaaagaagaatcaagtcataatcataaattagcttgggtaattcgtcaacacattaaagaatttattcctgatgatattaataatctgttaaaaatagttgagctaaatatagacttaaatatagatgatatagaaacaaatgttaatcaattactggaaataatatctcaattcacagaacctcttgtatttaacgaaaatttattagtgctagtcctggaaaagttagtttatctgaatccagtgactcctcgtcaatttgtggaggaactggtaaacgcatttattccttatttattaacatccgaaacaattcttaaattgcttacgggaaaagcagaagcttattatcgtgcttctcaatatcataactccatttattttgcgaaaatcgctctgcgtttagcacccaataacttagagtgtattgctaaaattattgctcctctgcaaagactgggacaagattatagtaaagagtctatttattggtgcaaaaaatatttaaatctcagtgaagatccaattgataaaatagttggtactcagtttttattgggagcattattaacttgttgtagaccttgggaagaatcagtcaaggtttatgaagaatacaaattatgcttatatgatattattaacagtcaaacgcaaagctcaagtttaatacaaattttatcaattggttcttatttgctatacatggaagataatcccagagaaaatagaccaattcgtaatcaactagctgctttgtgtcaaaaattattatggacaatatttagcgaaaatatcaacatctatcaacaacgttttcaatcaccacgtcctagtttaagtgagcgtcctttaagaataggttatatttcagaatgttttcgtactcattctgtaggttttttggcttggtggttattaaaatatcataatcgtgaacaatttaatatatatttatattctttaaaagaaagtgtttatgatccacaacaacaagcctataaaaatgaatttggcgatcattttcatcaagaatgtctgtcaatggtagcaatggcagataaaattaatgcagatgaaatagatattttagttgatctcgatagtttaactacctatagtagttgttcagtaatagcatttaaacctgcaccaattcaagtgacgtggttaggttatgatggaactggtttcccaacagttgattattttattgctgatcattatgtattaccagaatcagcccaagattattatacggaaaagatttggcgactgcctgaaaattatattggtattgatggttttactgtgggaacaccaactatcagcagagaatctttagatattcctgatgatgggattatttattttagttcccaaaccggattaaagcgtaatccccataatattcgtctacaactacaaattattaaacaagtacctaatagttattttattcttaaaagtcaccaaacgaatcacaaagatttacaagattttgttaacccaattgctgaaactgaaggagtagatttaaatcgcataagatatctccctacggcacgtttagatacagaacatcgtgcaaatttagcaattgctgatattgtcttagatacctatccctacaatggtgcaaccacaaccttagaaactctatggatgggtataccattggtgacgagggtgggagaacaatttgcagcccgtaacagttatactatgatgatgaatgctggaattactgaaggtatagcatggagtgatgaagagtatgtagagtggggtgtaaaattgggtaaggatgagaatttaagaaaagaaatagtatggaaactgcgaaagtcaagacaaacatcacccctatggaatggtcagaaatttgcacgggaaatggagaaagcttatttacagatgtggcaaatatatattgagagtaaaaaatagatagtaggttgggttgacgtgaagtagggaaacccaacatttattgtcaatttgattataatgaggtatatcaggcgagatgctcacctcacaataattgtattattatggtatgtaaatcattgacctcagaattgccgtaaaaccaaattatcccaaatccaaataacactatggttattccagaacttgaacaacaactgcttcaactctctgcccatgaaaaaatttacatcatccaattactagcacaaagccttactctggatcatccaaacaacaaagcccttacagaacaacccagtaaactttccgaattttttcgtcaatctccgttaactgaagtagctgaagaattagacctgagtagaaataaaagtttacctcgcgacaattttatcccataacttaattcctgtgaattatcttcttgatacttgcttaatttctgagactattcataaacaaccaaatcaaacagttttaaattggctagatgaacaacttccagaaacactttacctcagtgtaattacaattggtgaaattgccaaagggattagtaaactacctgcatctaaacgcaaggaatctttaacacaatggttacatcaagccctaccacatcgctttgagaatagaattttaggtttagacattgacacaatgagtttatggggaaaactagttgcacaactagaacaaaatggacggcctttacctgcaatggattctcttattgctgccactgccttaaaaaattctctcacccttgttacccgtaatgaaaaagatttcgcaggtactcaagttgtaattattaatccgtggaatttttaaaatattttaaatctaaaaatactccttttttcatgaatgttagaaaagagggtataattttatgaattgttgataacaaaaacatcattaattatattgtccagaaacaaggaaatatcaataatatgctacatgagatttatgatcagggcgtttatttaggttatttgtcatatcagggacaaggggaagaaacccacctattatcatgtattagatcaggtttgcaaaagttagatatcaaaatatcggaaaccctagaagatagtaatttgaatattattgatatttcgctgatatcatttttaaacgcaaatgtattggacttattgccacttttaaaagattgtgagcatctaaaagagaaaactctttttatcaatatgtctgatatttcttcttctcactttataggtgacaatgactactggttattatctacccaaacaacagaattgattaatttcgctaatggcaacaagattccttgggcgtttggttttcaacagaaattaattgattttacggataatttcgatttttctcagcctagaaaaagagagattctgaggaattttaaacctagtttacagcaatctgtgagagagtcgctagatttgattttagtgcctaagttagaaagaaatattactatagatagaaccgttgattattattctagttatgcaaataatgataattttttaaagaaattattgactagtagattttgtttagcttatggcggtttttatactagcaatgtattactcaatccttattttcatcaatttccagaatattctaagattacttatttacaagatgttgtgataggacgttgggatagttggcgtttatgggaaagttgggttatgggttgtattcctatcactttggattttgataagtatggttttcttctaccagttatgccagaaaattggcaacattatataggattagatttaagtaaattagatgaagatgtagaaagattattatctttatctgaacaagaattagatgaaatatcttacaatggtagagaatgggctttacaatattattcacctcaagctgttgctgaacgagctttgactataggtattgataaaattcttgatgtttaacaaagaaatactaacaattacagagaataggattataatgatgtacataagggtgggtaaaatgctcgcctcataattgtttagttttcaaggtgtagcaaaggtgtaaaaatataaactacaagtagataacaagttttattaaaagcaatatcgcaaatgcggttgctgaattagaagacgcaaaagtaaacggtaaaatatccttcctgggaagagtaccagaaaaaaatggaaataatcaaaatatggaaacactaacagtaaatagaattttagaggaagttaaagcattcctacaaaaaacttatcaagataatttagataaagttatcttgtttggttctcgtgctagaggtgatcatcatgctgattctgatttagatattctaattgtattaaaagaaccatttaactattctcaagaagtcgaaaaaactagcatttttatttctgaactgtctttagaatttgacttagttatttctcgcgtttttgcagagactaaagattttaactctaaaaatactccttttttcatgaatgttagaaaagagggggtaattttatgaatgatgaacagaaatatttattaattaaggcagaaagaagcttaaatgcagctaaagaattaaataataaaaactatcctgaatttgcaacatctaggtcttattatagtatgttttatgcagctgaagctttgttattaagcgaaaatttatcttattctagtcatgctgctgtgatttctgctttggggaaattttgcgtgaaaactaataaaattcctagtaaatatcatcgttatctgattgatgctcaggatcaaagaaatagaggtgattatgatattaaccctgacttaaccaaggaagatgctgatagattaattgtgcaagctgaagaaatgttaaattttaccaatcaatatttaaaataacataaggtatgttaatttttgactaaagactgatgaatactaactggaagctaatttatctttcacaacctgtttataaaatgcttctaaaccttctaccgcagtttgatcattaaaaacacggttctgattttctctggttctttctacaatactatttctaacatcagaatctaatcctaatttaactgctatttcgatatattctgcttctgaattagctatagtttcggtaatacctagcatttttaagtaagcataggaatgacgaccacgcataaattccccaggagaagtaactatagctaaattacacgctatggcatttaaagttgtaaatcctccattccaaaccaaggtatctaaataaatatcagaaatgagattgagttgcataaattcatagtgttgcattcttggtaagataatacaataatcttcactattcaagcctaacttagcaaaggctttttctaatcgctgctgaaatatatctgttatatgtttaccttctggtgatgatataaatacaaatttagcattacttacttgtctagcaatagacgggaaaatataatcatattgtggtaaatatttaaaagtagattgacaacacaaatataaaatacaatcttcagtaataccaaattcggaacgagttcttttcacttcagttaagataggtttgtcataacataagctgctatttggtaggcgaataagtgtttctgaataatgttcttctccattttcagactccattaattcactagataaaaaatagtcaactgtaggtataccagatgttactggatgtccccaagccatacattgaataggcgctaatcgtaaagcagcaagctgtccatctagagggttcatgccaatggcaggaaatactaaaatatgtaatttatcagcaataacctgttcacaaattgcttctatatcgttgggaatatgtacaaaactataactattcaattgatattgttccgttacattatcgctggtgataccaacatgataacaataaatttggaaatcttggcgattgtggtttttaacccatcctaaacacccatttgccccattatgattatacaaatggctggaaatataaccgactctaattttttctcctggacgcagtttgggcaatggtaaatcttgactgtattgagaataattagcagtcatgattttctggataacttgcccatattgtttttgtaaaactatatcatttttaccttgataggctaaataaaaatttgtgctacgactgattgcaaataaggcatttttctgatcttcctctccatataaagataaagtttgacataataatgctaattgttcacaacaataacttctataaaattcgatttcttctatgtctttatacaaaggaggtagaagctgaaaactagcagtttggattattacattatttggcaatattttgaatacagattttacttcctcaagaagttcttgatttttacctaaactgtgtaaactccgtaacaaatataaatagaaatctggagtttctgcatcaatactaattccttgtttacataggttaattgtttcttcaaagttaccgtttttaaaagacgaacatagctgataaaatacagattttactacatcatttttttgttggtatgccacacttaaatgatgaaatatatcaacattagaatgactagggtttaaatctgctgctttatgatagtaggaaatcgcttcatcaatctgatcacgtttatctaacaacaaattacctaaattgagataaccaccaaaatggaatggattatcagtgatagcttttctgaaaatctcttctgctttttctatttgattatgtaataaaaaaatatttcctaaattattataagcatcgactaatttaggattgagttcgatagctttctcataagccttgatagctgttttgatatcgtttttttctaatatcaaaccgcttgtataatgatatattgcttgagtatcatctattcttaatgctttatttaaacaatctagtgctttgaaaaattctccttgctcataatataaagttcctaaattttgccaaacattcgcattctttttgttcaaatggagcaagttataatatattctttcggcttctgaatatcttttttcaaaaaataataataatcctttagattccatctcaccaacatattttttcgtttctgcttcagtgattttggtaatagcttgatgaaaatctatatttacagttaaatcatattctgagttgttattatattctcgctgactatcccaagttaatatttgtaccccattccataataaataatctgattgggtaaaatctatcattaatcttgcttgagaatttgtagccagaaaatctctcactgcttgttgacaagatggccattgacaattggtgataataatgagagcttgattactaataatttgtttcaacgctagtaaccctagcaaataagaacgataatcttgactaccatcataaaaatatactcctattttttcacttagttcctgatttttgaactctacaagaaattcttctgtatcttgagaaaataaaaatacctgatctgtaagattgaatgcttctaagttacttgataatttatcaaaattttcaccttcaggatctaattccgaaaaattatctacagcataagctatggtatcaggattattcattaaagttgcgattaaacttgcaccttgaaatgtaccaatttcacagtaaatttcattttcatctaaacaaaatactgccaagtttaatagctgcatgacgttaggtgatatcatgctattaaccgtggtactgatagatttaaaaatgttcgctttgggatgacaagatacttctccccaattattgaatagttccggtaattcctgttgaaatttttgatagtccatgattaactccttgggttgttaattttacttttcaaacatcctctcaaatttgattaatcaaactatctagttgataactgtttaactggttaactggtgcttgtgttacagtcgctttattctcattttctaaaataactctaccgtaaatgcgagttaataaagattgccattgcatatcaactagcgtacctaccaaagaaatatctatggtatcactaatatctaaatcttccatcaacagattcatagctacactagataaaaatatttctgcatcttctatagcaaaatcacctgtgtagataatcaaattaattttttcattttcaggatgatttgctaatgtttgaatgacttgttgtaactccaaaccaagctcatcttctggttgtgtccaatctgggaaaatgatcaagtttatatctctcagatttagatttaatctgttaacaatatcgttattgatatcatcatctaaattatctattttgcaacttggcaactgtcttatatttccgtcttctctagttattttatcctccagatttaaaataagcttggcatcaactttaggtaataaagattgccatttttgaacacttaatgtttctatcaaggaaatgtgaatggtatcactaatatctaaatctgccatcaacagattcatagctacactagataaaaacatttctgcatcttctatagcaaaatcacctgtgtagataatcaaagtaattttttcatttttgggatggtttgctaatgtttgaatgacttgttgtaactccaaaccaagctcatcttctgattgtgtccaatctgggaatattattaagttaatatctctcaaagtcacagacaagagtgttgcatcaattaaagcattactcatggtttcggccatctttgtccaagaaaactttttagcctgtgcaaaaccagcatcaattaaaatatttctaatgcttggtttttgcacttcacataaagcatctgctaatcccatgacatcattatcattgatataaatagctgcttgtcctgcgacttcaggaagggaagcgttacgggtagtaatcacaggacaaccacaggccatagcctctattactggcattccaaaaccttcatatttagaaggataaactaaggccacagcgccagcataggctaatctcagttcttcatctgttaattctaatccatgaaaagtacatcctgctgtatattgtcgccattctgatggtaattggtttcctgcaccggtggaaacaatatcaaaactctctttatttgctaattgatttaaagcttggaaaaagagaattgcatttttatacccttgtaaattactaaggataaaatatggtttatgaatgccatatttatgtgtgaaagtattaatctctgtttccgaggcaggagagaaaagaggatctacaccacaatgggcaacagtaattgattctaagggtatatcagggaaacatttatgtaagtctttcgctgtattttccgaaatagaaatataagctgatgcgtgttgtatggcgtgatgtttttcccgccacatcggtttatttaagtcacctcctaatacttcaggaatcatgtcataggccataaatactgaaggggtttctataggggtggtgtagtaggtggaaataaataattctgctgcttcttcattacagatttcttgcagcatttgtttatcagcttcggtattgttatagtcgtagggggcaattgtccgataacgaataccgttaattttgggtgcagtattagctctatctaatactaaaatatgatgagcaaattcagtatttttccattgttctaaaatactttgccatactctagctattcctgttttatagagttggaaaaatacaccatcaataatgatgataggtgattgagcttcaggaatattgactaattcacgatcagtatcaacttgatttttttgcaaaattttatttactacttgattaaagtcatgggataaaagtgattctttgttaggaagttgcaaattattttttgcaatttcttcaaataaattatttggtaaatttcggtttttggttaacaagtgcagagattttccatcagtgtataattgcagattgtacttactggctaatacttctaaagatttgcgagtatatatggaaatatgttgaccttcatggggtgtataataccaccattgatctggtgtgggattatcttctggcaataattctgtactaaacagaagattaggacataaattaataatatattctaactcctgtagaggatgagttagatgttcaaataattcaaaggccgtaattaattctaaattttctttgtcggttgtttctaattcaaatcctctagcaaatatatttttacagaacttatcaaaccaataaaaatcaaaaccttgatctctcattaagcggacaaataacccataaccaccaccataatctaaaaacttggcttgatgatcaaaataattaaatagcaatttgcctgtaatattggccatcatattattacgatagactaaaccaacatcactaatggcgatcgcctcggaataagcttcatctaaccaatagggttcttccgtttgtacaaaaccacagttagaacactgaaaataattaacgtcgtatttttgcaaaattttagctttagcaaaataatgagaatccgagttacaaaccttacatttttggactgattctacagtagatgattgtgaaatcgtaccgctaaattgtacttgttcagtaaaattatcagcctcactatttctgttgatgactagaggatgttggagaggaaaagtcattgcttcaacagacatattagcaaggggactattactcatagttgtatgagtaccagaaccaaaaccaatattagaaactaaattcacatgaggtaatattgttaatccattattcgcccaaagggtaaataaccagatataatcccacgtattaaaaccatcataaacagcttggaaaatttgtgtccaataactaactgcttgttcatttcctaagactttactcagccaaccgttattttttaaccttggccatattgccatagaatcatcatactttgtccatgctctacgccaacttgcccagccccaaacatgaccataacgggaaaaataataactatcttctgttctctttctgccaaattggaagttatctcccgaaatcatcatcacccgttgatcatcacgatatttttctaataactcctgacaataacggaaaaatgtaggatgaggaagacaatcatcttctaaaataatcgcttcttctacttgctcaaatatccaatctaaaccgctacttactctttttctacatcctaaatttacatttgagtaattagttaatacttcacattcccaatctatttgattaattatggctctggtagcagcacatttttctgcttctcctaatttctcggctcttggtccatccgctactactaataatttaggtggtttagcttggcgaatagcttcaaaaactcttgctgtagtttcaggacgattaaaaattaagaaaccaacaggagtagttaattgccaattatcatcatattcataattcacagatgattgtaaaccagcaattttagctaaattatgtttaattttttgttctatttgatagctggctgatagctgataattttggtacgtttccccaccatatacttgttttcttaattgtaatgcttccgcttgagttgcttcttcttctgctaattgaatatgtgctagttctttggtaagttgatactgagttaatttaatagtggatttagcgacaaaattagcgactgtgatccagtctatttcatgttcagaatttgtataaataaactggatattttcagatggtaaatttacatagttttgcaaacttattgttttttcttgataaatagccaaataacaggatgtatatctcagacttctctgtttagaactaataataggaaaatcgtcgctatagtcaaagtctaaacccttttctatatctataaataatgtttttatcccactacctgcggaagtgttgtaagtgctaataaaaacatctatttgtaaatctcgacataaacaggctaaacgacgatcttctaatgcagataaagaaaaatccactgaaggagcatatagattatgaagagtgctaatatcaggaaaatctaaatctgagtttctgttcagataataaatctccgttcctcttaatcttaaaatcagtctgggaatcagttgttgccaaaaatcaatggctttttcatcttgtacctgactgaacactgctccatcaatgagaagtttcataatcgttacctaattgttgcctattttgttaaataaatcgtgttttctttaattagttctcagactttccactaaactttggaattttttatgtccatcaacttgacgttgataattactatctattgttgcaccttgatagcgatccaattgacctttttctctgagagtatgtaaaggagtaccttcaatttctgctgttcctgactcttgataggtatcaaaaggtagagaagcaataaaccgcttggtatctaacatttgttcttgggtttctcctggtagtccataggtgaaagtaccatgaactgtcatccctaatcgtttagcttcaaaaactgcctgacttgcatattctaagtcaagatgtttgttaacgattttatctaccacatactgattaccactttcaaagcctaattttactccaaagcaaccgctttctttcatcactttccaagtgtctaaaggaattgtatctgcacgacacatagcagaccaaggaataccaatcctactcatcacttcgcacatttgtaaaacgtgacgattacctaaattgaaggtatcatcatcaaagtaaatacatttatattgatagcgttctatcaattcccgaataaaagcctccatatattctggagaatattgtctaactgtgcgggggtttttaccttcgggatcattaccagtcatagcggctggccatacacaaaaaatacatttaaaaggacaaccccgactgctccaaatttgagcatggggtggtctttgtccgatggggtttgcatcccaataacgataagcgtgtagttcatcaaaatagggaaaaggagattgattcatttcttctgtagtcagcagatcatagtcaattattcccgattctccattaattacacgcacactgcctttttcatactcaccacgaatacaagcataaactgggtagttattaagaatttcctctgattttgttgtggtaattggtcctgtgacaactattttacaatcaggaagcagtttattaatttctctaattaattggctgtcatgttcccaactaggggtagctatttctatgaagatgtattgatatttttcctcttgtaagtggtcaaaataagtttgataggattctctgatagccagactatcacgaaatctgacatcagtttgagtttttgcactggtgtaggtggctgcgtatcccataaagaagggatagggtaaatagtcaccaaattgatactgatctggtgctgatctgactaggtaggtgaaaggccaacgagaacctgctctcacacctgcacgccaataaccactttctttgttttcccaccagggaggattactgaataaaattttcatagatatctcagcaattttgaaatattgtatcttttatacccagatttatccagagagtttcattatttgataatttttaacaaattttaactaaatagtaaggctggcaattctgttaccgtagagatagggtagttgaagtagaagctattgctctatacttaatataaaattaaatcaggattcaccaacaggatggtagttatggtaaatataacactaaataagttacaagaattgtatgaatttgatgattatctctggttagaggaaactattaaacttttaaaagcaaaagacttagataatttagattgggataatttaattgaggagttagaaagtttgggaagaaataatttcaacaaagttaggagtctattaaggcagattattattcatattttgttattgcaatattgggaaaaagaatatgatcgtaattatcgtcattggcggggagaaattattgcttttagagatgatttaaacaatagcttgactaaaactttgaggaataagctatgtgatgaattagatcgtacttatcatatttccctgaagttagtgatagaaaaaactggattatctccagaactatttcctgataactgttcttattctttagaacaattactcgatgataactggtatcctgaaaaataactgtaggtgggaataattggaataagtatttagctattagcagtcagctattcagtgattcaggaaattgattctaaagaatttcttgtaaaaaatccaataatactttcattctttgatcataggtatgatgagctaaaactatttttttaccttcttcactgcgtcttttccgttcctcactattggctaaatattcaactgcttttgcccaaatatcttcataaccatcactataaacaatggtgtcaccaaaggtattttccaaagattcaaagtaatcagaaataataaaacctccacaggctaaaatatcgtaaattcttaaattaatagtttcccattctaaatgttcactaatatgagcattgagattaatcaggctttcagaatataatttaggtaaatctggcatgggtaacaaaccacgacaaacgctatttaagggtggtattgtccacatattaccgtgaattactaaacctaaattaattaggggggcaaaatagcgttggttaacagatgcacttctaataccattacccacaaaagaaagaggatattcatataaaccacaggtttgagtatagaaaaaatctgcatcggtagcaaagggaatgactgcaccatcagcacaatgatcttttaatttttgactggtgaaaagatagccatcatacttattgttgataaatttatgaaatgcctctactgtaccgccttcatacattagccctgctccaccggttttacccagattttgtggtttttggtaggcattttgcagataaaaaagatttttagcttgaggatgtaatggttgattgggatgaaaatgaatgacaacatctggttgttcatctatgatatcattcatgttatataagttaactgattccacgaaatcagtttttaataaggatttttgccagcctctagctatcagttcatcaccagtaacattcccccctttaatatctaaagtgccagtttggacaagacgtataccgattttcagtttatttttcatgtttttaattaggcgggaccaagaataaaaggatgttgataataggataagatagttgcttctatttcggcgctgatatttctgtataagatagccattccactggtagtacgtcttaaaattttatttttaaagcctgattgagaagctaaaattataattttttcccaaccctctagcatattaaagtttaagacatcatgaaaagccacaattgccgaatctgacaaatagggtaatatcgcttcaaaatcaagatacacctgttcattggtatgtaaaccatctattaaagcgaaatctatggtttttccttgttttattacttgttctaatgattgaggcacgtcttgaggagaagctccgacataagcatgaaagttaatgtttaatttgttggcaatttttacagctaattctaaagcttgtttaccttccctaccctcactacaattgtcaattccatataatttcgctgaaggattaattaatcctaaagcatttgttgaccaacctgctgctatgccaataaaatattctatttcaggattaaattgttgtaaaatgtctttcaaaaaattgatttcatctacagatattcctcctcctgttgacaaaggaggaattatagtaggcttgtctatattctcaagtaaatctttttttagtaaacaactaaaaccaccatgaaatgatttttctcttaaaggatttaaacccacagatattgaataaccttcttcttcataagcggatattaattgacacaatagactattacctttagtcataatttttttattttcttctaattcatcggtgaattgatgtgatagattattattattattttgtaatcctaattcactcattcttgccaaccaaatccaattataaaacagttcaaactttggaaaagactccctcacagccttagcaactccccaagttccctcatcagaaaaatcatctcctgctaaaaaaccatgaggcttaaccttccttaaagctaaattaatcagattcttaactgactcataatcatgggacgtatctatataaatcaaatcaaaaacctgagcagtattttgcagaaaatttacatcaaaatcagaaaccaaaaatacattactactcaaaccaagttttaataagttagaccgagttctttgtaaatcaggagcgtgaccaaaacctgcttcttgccaagttaaattacgtttttcctccggccaatcttcacaaaaacgatcttcaaatttatccactcccacaatcacacaatcagttctacctaattcttctgctatagctttcatataagctatatctcgaccataatagacaccaataacacaaatattcttgatatcaggatgagataaagcttccctaaaaaactgccagtgatgttgaccagaataaccaatacaaacagaattaatttcttcgattgttgttaaattcaccataactaaccctcttatctacttatgaatatcttagtaattttcaatatttacgtcaacaaatgactaataaaaatatcaattccaggaaaagccaaagggttaattatcggtttttcccatttaatttcacataaataatcaccttgttctggctgacgaaaaacaattaattcttgagtttgtaaattgataatccaatactcagctatttcagcttcagcataaatcttttttttaatagataaatctttaattaaactggtattagctacttcaatcaaccaaaaaatatcatcagcataaggatgatgttgatcatatttagattcaggtaatttaactattgcaatatcaggttctggttcagagttagataaagtaatcggaccattaaatcttacatcagctttcccttttaaaatattttctaaataacttacactcctttttgccgtattataatgctgaggtaattcgggactcatttccacaacttctccatctattagttcacactgacgaccttttaaaataccagattcaatcattttatgataatcaaaagttgtccatttaactaaagttttcataattgaaaatatccctcttttacttctatatttcttcaagatacttcaccacagttttcatcctgtgttcataactatgatgactaagaaccaatttcctcccctcttccgcttttttcttcctcaattcagcattagataaataataactgattttagcccattcatcttcataaccatcagtaattggtactaaatcaccaaaagtttccaccaaagaatctacatgatccgataatacaaaaccgccacaagctaaaatatcgtaaattcttaaattaatagtatctaactccgcgtgttgcgtaatatgagcattcaaattaatatcacaatctgaatataacacaggtaaatctggcataggtagctttcctaaccatgcttgagataagggaggttgccacatattgccatatattaccaaaccaaacggtaaagccggagcaatatatctttgattgacatcaggacttctgatcccattacccacaaaagaaaccggaaaattatatttacccccaggttgtggattaaaaaattctggatctgtagcaaactctaccacagcaccatctccacaaaacttttttaatctttcactcgtataaatataaccctcaaatctatctttaatcttctcaaacacacccactgttccccccggataggtttctttgggaaaagcattttgcagataaagaatatttttcgcagtgggatgtaattccaaaaaaggattaaaatgaataactacatctaaatctgctctcatcaaatcttgtgcgccataaatatctgccacctcaactttttcatgtctagcaagatacttatgccatcccctaccaattaactcatcaccttgaatatttccctgtttattaatatcaaaagtatctattccaaataacttaattcctactttaaattttttcatatcaatcatattcctcctatctctatttgttcttgaatccaaggaataatttcatctaaggattcacttaaagatgtagtagctgcaaatcctaaaatattcttggctttttctacactaggaatccgtttttgtacatcatatttaaaaggttgttcagaaatataattaaatggtttatcacctttaattttttgccaaattaattcagctaattctaatactgtagtagaaactgatgttgaaagattaaaatcctcattaattgctttttcactttcaatgcagattctaattcctttggctaaatcccctccataagtataatgtctaatttgatttcctgcacctaaaatatatacaggatcttgaccttttaaaatcttctgtactaaatctggtacaacatgactcatggctaatttaatattaccagaggaaatttccttatcacataaagctcttttctctccagtaccaatacaattaaaaggtctaataattgtgtagggtaatttatattgttcccatgctccctgagcgaaatattcacaggctaatttttgaaacccataggtagatagaggaggaggacattttaattgttcaccttctggactgggaaacacattggtactttcaaataccattgaagaagaaatcacattaattttctgtaatttttgagttttaaaagcccaaatagcagcatcaaatgtagaagcaataatacgctcgttttctgctaataaatcataagcatattcatgaaataaagaaattccaccgatcatagcagcaccagctactacttgatcacattctgctatcaaatctttaagtaaattaacatccttagcatctccttctacaaaatgatagtgaggatgttgatcataacttttgctaaccttaccatatttggaaaagttatcaatgcctacaacttcatgaccatgttgcaaaagttcctctattaaatacccagcaataaaacctgctgaaccagttactaaaatcttcatttaaaatagtcctccttgtccataaaaattccaaacatccaccaaaatcttatcttcactaatagctaaattttgatattcccgatgaggagtagccaaaataattatatctgaattatctattaaattttcaacactgacaaaatcactttcatggatgtacacatctgagcataacacttttttggcttcaaattctaaaacctttttcagtttataggaaagcgattctcttttatcatcattattggctttaaaagccatccctaatataccgactattttttgttttaaatcatatttttcttgtaatctattgacaacaaaattgggtaaaccttcattaaccaacatggcggtatgacccataaaaaagctattactactataagctgccacctgcatagtatctttaagcaaacaaggacccgctgcaaaaccaggtgcgggaaaattggctgctcttggatatttataggttatagcatcgtagattttataaaagtctaaattgttttgagtagcaatttgataaaaataattagaaatagcaaattgaatgtaacgccaagaattagtaaataatttggctaattctgcttctgtaggagttaaacagataatttcattagttagtgattgaaataattttttagcttcattttccgcagtttcatcaaaagatgatacaatttgtggtaaggattttaattcttccatcgccttaccttctgcaattctttcaggacaaaaagaaaccttagtttgtttattttttgattctaaataactcttgattttctctgttgttcccggataaactgtactgcgtaaaataatatgttgttcatcagaaattaaatgaattatatcattgaagaactttttaaacaaagtaaattgcgggtttaaatgctcgtctactggtgtgccaatgacaactatcacaaaataactatcagcaattacttgttgatcattagaaataaataaagtctgctctaaaaccttttgtaaaatagtttctgccccctgttcaataaaaggcatttttccttgagaaaccttatctattgtcgcagtattgatatcatataaaactacctttttaccagtttctgctagagaaatacctaaaggtaaacctacatgacctaagccaccaattatacaaacatcataaacaaaattacaatttttcatatttgacagtaccaattacctatttagtaggttgattattttcctctgtttttttctttatatctgccaacacagtcttataatcctgtctatctggatgtaacttcgctaacctttccatcagggcaatcgttccttaaactaccccccatatccgtaaaatacccacaatttccaaaaatatatcatctactagatatgttaatgattatttaaataaatatttacaattaacattaccaaatcaacaaatcattagtcaatgcttttatactaatttagatttttattaaccgaatttacagaatatttaccataccatctgacaaccataaccccccatcccgtaaagcctcaattcctggagatatatagtcatttaacttaagaatgagacattaagatacacaataatcacggatgatttcatctaagggtgtatttgaaggagcatacattctggctctctttaaggcactaaaatcatgctcaatatc

SEQ ID NO: 78 - DNA, 23757 bp, Sphaerospermopsis sp. LEGE 00249
  LEGE00249_96
gtccccagtccccagtcccctacaactgcctcaacattttatgtgtttgggggatcacccgcacttgtttcacaaatcgcttcatcaaagcttgccattctaaaacttggtttggtgtaggggcttctacagctacctgactgaatttttgagattctgctaaaggtgtcacaggttgcagaaatataggaatatcctgacatataccattaactaataaagctgctcgttccaattcgccaggatcagtcctttgagagacaattatcttgacaaaaatttctaaatttgcatcaaagcatatttggagaaatttttcatgttctgtccaatgactttcgccactcacactaggcaattttaaatccatgcctacagagtcaaggtacgggagaatcatgtccagttgctcagggcgatgtcccccagtttccagatatataggcaaattggtcagcgatcgcacttccggcaaaaattgcgccaaaaatggagcatgaagaagcggttcacctccagttaagctgatgctatcgtgtagaaaaggtaaattttgcctttccacccatttgatcaacgtggatagaggaataggattagagtggatttcaaaatctcgcaatcctggtgaaccctctatttgacatacagagggagcattccatgtatgggaactatcgcaaaagtgacaacgcaagtcacatattgcaaagcgaataaaaatctgacgtgtcccgacgttgagaccttctccttgaatagcagagaaaacttcaatcaggcgtgctgtaggtttaactgtagttttagcaatcatgagatgatagagaggaatgcgttcgcctatggtttagcacagtcgctgacaccgattgggtatgaaaccagtaggtttctagcttgtttttccattgtgaaccgtgttcggcaatctccaaatctctgcgcgaaaaactactcacctatccttaatcttatttttttcaaaattaggttaagtagttttccaggaaaaaatcatgtttggcagattagaccccaatggcaaccaaattgcatagcttcatgagtagccaacccacagaggcaaatttcccagttacttacctgaacgatacagcaatagtacaggtgtcgatgcgtttgagcgtcgttgaggctgtatgctttaaacaaacctgccaaagcctcatccaagctgatacccatccccaatacctgatcattgacttccaaaatacgatctttatggatagtagtggtttgggggctttggtgagtaattttaaatatgcccaagaacaagggatcggattcacacttcgtaatgttacccctcaagtaatggcagttctcaacctcacaggattagatcacgtatttgctattgagtctcctcacagcgttagtcccatagaacctaatcatattgaagaaaataatcggatcactaactctcgcaaagcagatcccctacctcaaacacatccttctgtggcctcttggatgaaaagattgattgacatagttggatcattggtgggtttaataattacagcatttttattcattcctattgcgatcgctattcaaatcgacgatcccggtccaattttctttaaacaaacccgctgtgggtggatgggtaagcgttttgctatttggaaatttcgttccatgtgtgttgatgcagaagctaagaaatctcaagttcaaaaccaagtccaaggtgctttctttaaaaatgatcacgatccgagaattacccaggtaggacgctttttacggcgcaccagcctggatgaactaccccaattttggaacgtcctcaaaggcgaaatgagtttagttggtactaggccacctactcccgatgaagtagaacgatatgaagtaccagagtggcaacgcttagatgtcaaaccggggatgactggtgaatggcaagtcaatggacgctctacagtacgcagttttgaggatgttattcgtcttgatttgcagtatcaacaaaattggagtttagtgtatgatttaaggctgattcttaaaactatagctattttatttaacaaaaacagtggtgctgtttaaaagtcagcagtttcaacaattcgtaaaaattacattttaaaatttacccaagctcattatatcggctctgggtaaattttttggtgttttttttggtgtttttaaatagggtttgctgaataaacctaaaaccttgatatatcaaaggttagaggctgataaacacagaaattagtgcaagggttttgttaacaggcaacagggaacagtttcaagagtttgatgggagcgatttttcctttcaggacttacgcaaaagggaacgaaagtaggggtaattcatgaattacccctacgcaagaataaggttttcagtcacatcttccgtaagtcctacctttgtgtacaaattaaatgccaggtttttgagttcccacctcgtaaagtcttgcacttttttaacttccagcaggctaagaccctttacctgtaatattttcacatttattcagccagccctaattagcaatcagtaatcagccaactgcataaatagtagttaatctcaagaaggtttccttttttctcgccttggttatacccctaaacaccgatttttttgttagtattcaaaaaaacctattcacacaattgcaagttgtttgtaagcacatcggacaatttgtaatcaaaaaaggaaacaagcaactgaggttgaatgactgattatttcccaagaaatttaccattagaatctgttccactgaccaaaacaacagtgaacacctcaatggcggaaactgataatctgagcgaaaaattagctataaccatagctgaagctggatcagaacgcaaagcaggtgagattttattgctgaaagtagcagatgtctcctacctgtctgattactttgtgatgatgacaggctactctagggtacaagtcagagcgatcgccgcagcaatagaagagaaagtagaaacggacttgcaacgtcgtccgttaaggacagaaggaaaagctgaggggagttgggtgctgcaagactatggagatgtgattgttcacattatgatgcccaaggaacgagagttttataatttagaagcattctggattcatgccgaacgcatttcactgccaaactctgatcaggttgaggataaaccaagatgatgagatcatcggtttctaactgcccagttcccacagaacaacaaccactcaatgagtacgaagaattaaaaaattcctggctatttcgggatactaccttaagctggcgtaattatctcaccaagatttttttgatttggagttggtcatggctggttgcaggtccagtagccgctgccagctttcctccacaaaagcatatagttcattttattctctgtggatctgccgctgctagtgtgggagtagtgctgatattggtgcggttgtatttgggttggttctatgtgcgcgatcgcctttatagttccacagtcttctatgaagaatcaggctggtatgacggccaaacctggacaaaaccccaggaggtcattgtccgcgatcgcctcattgtctcctacgaaattaaacctattctccaacgcttgcaaattacctttgccgccttggctttaatgtatcttattggtactatagtttggcatttgttttgacaatgggaaaacgaacacaagccacagcactggaagtccggttactgcgggaaggtattatcgaatctaggcatatagtccaggctgtagtcagcgacgaccggggacgagttctatctgttgctggcaacgccgaaaccgctgcctttgtccgttcagccctcaaaccatttcaggcattagctgtcaccagtacaggcacactggaacggtatgatttgagcgatcgtgacttagccatcattaccagttcccacaaaggcagcatggaacaggtacgacaagtatttaacatcctctggcgggctgaccttgaccccagcgccttgcaatgtccagttccagaaggtaaacgcagcaccctagaatacaactgctctggtaaacacgctggaatgttagcagtttgtcagcaatgccattggcctttaaataactatttggatcgtaaacacccagtccagcagttaattctctccaaggtagcagaattattgagaatgccagcagccgaatttatcggtgttcatgacgactgcggcgttcccacatatctgatgcaactcggtcacatggcatctttatatgctgtactcgcctccagcaataacttagatatggaacgcattgtccgcgccatgaatcaccatccgactatggtggctggagaaggtgaatttgacacagaattgatgcgcttaactcccggtgaactggtcagtaaatcaggtgcggaaggagtacagtgcattggccgacttggtgaagggatgggactagctatcaaagttatggatggagcaaaacgggcaaaatatgctgtggctattcatgtacttcaacaaatgggttggattagtcccagtgttgcccaaagcctgtccgagaaattcatgaacttggggaaatacaagcgtttagaggtaattggagaattatcgcttttgtagttgacaaactcttgactatgagttatattaaaaaagtcaagagacgaaagcgacgcgggatagagcagcctggtagctcgtcgggctcataacccgaaggtcagtggttcaaatccacttcccgccactaaattaaaaacgagactctataaagttttaaagctttatggggtcttgttttttataaagaaatccagcgaaccaaaaccactgagggaaagtatcgaaatttggcattgatactttatcgggctttagatggtggagaaaggaagtcaaaagtcaaaaatttagtttagggtggggaatgtgggttagtagctagttactgttttcttaactaatttcttaactaatactaacaaatactcacatttacccaaaatttccactcatctgctcttgatgacagaattacagtaaaatcactgtatgctactaggattcaaaacccaactcaaaattaacaagcaacaacgactactactagcgcaacacgcaggagtgcgtagtcgaactggtgaaacaggaagaaaaagccgacttttgttagcattagcattagttagtttttttgtatcggctgtaaagcaatatccctaaatttctcttgcaatttttcccaagtcatacctgctaaactaggtaaaacaatgtgagcatttcccaccctttccggtggtcccatacccaccgcccacatacctgcggctaaagctgcatctatacctgcggctgcatcttcaaatactacacattgctggggaggcagtcctaactgctgggctgcaaataaaaataaatctggtgcaggtttgggtttatgtacactataaccatcagcgatcgcatccagtttatcactaattcccagcttttcaaccactacatgagcgtttttactcgctgaacccagagctatttttaacccagcttgacgcaaatcatccaacaaagaaaccgcacccggtaacaaattatcaggagtgatattttcaatcaattccacatagtaatcgtttttacgttccatcatctcctggatctgtgtatcagaatatcgcctattaccaataattaacatcagggaagcacggcgagaaattccccgtaacgcctcattagcttgacggctaaaaagtataccttcctcatccgctaacctctgccaagcttgatagtgatattcagccgtatccgttaacacaccatctaaatcaaaaatcacaccttgaatattagtagcagatgttttcccattccctttttcccggtgtaaatcaaaatcatgccatttgccacgccagtataatttaaactttaagcgtgtccaaccagaaggtaaatggggatgagctacgggctgattatttgtaaattgaatacctccaaaaccaaaaactaccgcttgccaaacgcctcctgcactagcaccgtgaataccttcattcgcattcccccggatatcttccaaatccaccatcgccgcttgcataaagcgttcataagatttctgggttttccctaaatctgcggctaatatcgcgtgaatagctggacccagggaagaaccataagtaatatccgtgcggggtgcgtaataattccaatttacttctaaattttttatactgtaaggaaattccgcagattcccgcatgagataaagtagcattaaaacatcaggttgtttcagaacttggtgtttatttgcaccttcaatacctaaaatggcttgcattgacttgtgacgcggttcgtagtctgctaagttaatatcatctaattggaaaaatccctcacattgctcaactaatcccgtttctgggtcgtagggaatccagattttgttaatgatttcttgccaatggtttctgatttcgtcagtcaggtgcaatttctgctctagttcctcagcgtattccggaaaattacgctttaataagttatcaactataccagctttttctaaatgccattggactatccgattagtaaaactattgttatgtactaattcatggtattcatctgcacctataacactacgtatttcataacgttgagtgtgagaattaaattcaacgcgacttgaccagaaaattgcggtatctagaattatctctgcaccataatctctgagccattcatcgtccccagtcactcgccaatagtaccatacagcatagggaataactgagctaatatgaatttcgcgatcgcggcaccaaatacgcacatcctcagcataataatcactcggtagcgcccagcgtggtgttacttcatccccagtcaccgcactttcccaagcgtacattgccccttggtatccataatgaatcgctttccgccgcgccccatctaaagtatgatagcgataagtaagtaaattgcgagctagtgctggttgagtaaaagtaaaaaatggcagaataaaaatttccgtatcccaaaaaatatggccgtgataaccaaacccagacaaggtttttgcgggaatactcactctgtcatcatcacggggagcagcaatcagcaattgaaataaattataacgcacagcaaaagcggccttactatctccttcaatgagaatgtcgctttgttgccaaacctcatcccaagcttgttcattcgcatcacgaagagttatataatctggtaactgggcgagtttttcctgtgcggctaacactggttgatcaacatcacgcgaggtaaaaacagtaactaatttttctaaggttacggtttgctgtagttcagagaaaaaagtggcgctgatactaggataacctggtgcggtattgatttgcatagccgcttcaatgcctgaaatagtcatttttgcagccatcccgatatcaatacgggagtaacgggtgcgactgtgtaaccaaaaaccttggtcaaatttcccttgatctagtccttcccagtgattgaaacctttattttctgggtagccattgatactggattgtatttcaattaatccatgaaaatctactgtggttaactggcaacgttgccctaatacatgatgatccgctaaactggcaaagcgttcaaagctgatatctatggtttttcctgtgggactgcgccaacgtagagaacggctaataacgccttgacgcaaatcgagttcacggttgtactgcaatattgtaccttgatcaagacgaaagcgttcgccatcaatcatcactatcaatagtagccagtctggacagttggctagttcgctataaactacaggaacatcgtcataaacaccgtgaatgaatgtagcgggcaatgcacggggatagctttcttcaaagctgcctcttgtgcctaaataaccgttaccaatggtgaaaatggtttctctagcctgtaatttttcaggattaaactggttttctattaatatccagtctgtgtagatcaaatcttgttgtttttccatttttattattaaatattactaaattaatggattttttcacccagaggcgcagaggcgcggagggagaaaaaagagagatatagggaggatccccgttgtgtagtttttttatctaacgattgacaattatcttcggcttgtatcttcggcttgatatgattgaaccgcaaaggacgcaaagtacacaaaggtaagagagtttcagagagttgttggtgtggctacgttaatttttttaagaattttagatttcaggtttttaaatgggaaggtattgtttttgtggttgtgtgtgggggataattttttctgctcttggtttataaatgagataaaataatgtttccatatatctatctctggcttcgttgtcttctggggcaatcaagttccaaaaactaaacattttagctaagactaataattgttcattgtgtaatttccagttgtatttattgcgaattctttgaatcatccattgtgaagtttcttgccaatattctgggtgggattcacatttatctaaaaagttgataattgttttcgctgtacctgctaaatctgtgggattgagatgaaatccattttgccaatcttcgataatttctaatgctccaccaaatttagtggcgaatgttggtaaaccagaaatcattgcttctaaaatgctgcggccaaaggcttcataaagggcaaaatgaacataaattccttgtttatcggcaattatgcgataagcttcaccgattttattgctaggtaagcgcattcctaaccaacggattttacttggtagagtatactggttaataatattgtgtagtttttggatttcctctgcttcttctaagtttgtggcttcgtcgggatataatttgctggttaataaaattaggttacatcgtgattgtaattcgttacttttaccaaaacattccactaacccagtcaggtttttaattgaggtaatcggtgcaactgcaaaaattggtcttttgttactatcgtctaatttaccgaaaatgtgatcatcttcttggtgaaataataggttttgaatgtgttggctttcttgaagatttcttttttctgtttggttatagggaaaaaagaatgtttcactgactcccggagcaaccatattaaattttggattgaataaatcaatgccatcaattacatgatataattcgggcattgtaaaacatttgtaagattcatattgccccattgtgtctggcgtaccgacaatttcttgataggttgaagcaatgataaaatctgctgcattcatgctaattaagtctgctgtaaattgggcagaaaagtgatatttatcttctaattcttgccaatataagttactgaataggtttttcggtttttctagggaatgggctatattacattgagtgacttttaaactccgggagagaatagaagcaactaaattaccatcgctgtagttaccaataatcaaatttggtttaccttgaaattgctctaatagttctttttctgcatcttgagcaaatttttctaaataagaccaaatttcaaatttggaaatccagttattggtaatttctggatgggaatctgtaaagggaattcgcaaaatccaagcgttttctgtgttgttaactttttctaatcgcaggtcacaaaatgttccttgacagttgggaatcaggcgagtcagaataattacatgaggtttgatacctaagcagtccagaccagcaagtttaatttcttcttgtagtttgttttctaagctgcgtgcttgttcaaggacgtaaataacttgacctaatgtttcttctcttcctaaaacgttttcttgcgctacccaaccatgtatagaaataagaactacgcgaaaaactgcgggtatacgcgacacaaaggcttctaggagggaaggttggggggtgtcgatgagtctttgtaagagttctagggtttctttgaatcgccctacattgttaccccaaccagcttcaaaacccagttgttgcagttgaaagcgaaattctgggtagggttggtgagagggaagttcccttaaaaaagtgatggctggtttaatttgtttggcaaactgaataccagaacgaatgcgatcgccaattaacaaccgcataccattgtattgtattgcctgtaatgcttgaaacaatttatctaaccaatattggggatcagtaacaaattgattgcagagataatggttaaggaaagtcaaaccttgaccaatatttcggggatcgctagttcttggagatgcttggtaaaatgggtgcagatcaatttctagaatgtgagattggtaacgattgactaagcgatcgctcacatctaaaaattctttaggagttattaaatcaaactgagtaaaatctgaggttagtttccatacttcttgactagcaattctcggtctaactacaaaccaagtattttccctttccaaaattatttcatgggtgtagttaataagtgttcctaaagaagaagaatggtaaaaataagccggtttttgagattgatgacaataatctgcaaaagcttgcaaaatttcatttcttaaaaagtaacgttgatccttagtatctaaagtacagagaaactgacgaatctcagttttttcttcactgtttaaaatagcctgaaataattcatacatagggaattacccaaatataacacccacaacgtcatttttctcaccttaaaaaccatcgttttaaaagatgggttgggtaaggtgcgttttctctgcgattataaataaattgtcaaaattatcgcgtctaactcaagagtgaaaccataaagtaattcctgagatagagaacaatatatttagttagatttctgagtattagttatccaaaacccaggagaataataaccttaaatcagaccatagtcaccttttagctcactagcaaaaaacgttatttgattcaatagctgctaattgcacttttgtaaaccctttgtgtgacactatttaaataggcatttaaacaagatacaaaaaatgccatccattataatttctttatataaaaattgccaacttggctaaaatgaccgaaaaaaaagagtattctgcatatcagagattgtttgtgtttcctattttttctaatcacacaattgactgaggtattaacataaataacttttgataaccttaattatttaagcataggcaacagaccacttgagaccgcagctaatgtaaaccaaaaactacaaattttatcagggccagtcatgaattaccgagtttcttcttctccagctacctttgagaatgttattactcctgacgaattaaatcagattattgaagcgattgcggatgggagatattcctgggcttgtgtgttgattttgcgttttattggctataatccactgcattatataccccagcgaacttatagcagaatcatgaaagaaaatagccaagttgtcacaacatcaacatctacaactaaacagaaattgcaatctgtcaataatgatcatcggggaactccatctcaaactttcaacaataactaagtaggggcaaaccccctgtggttgccctcttgaggcaggaggcaggaggcaggaggcaggaggcaggaagcagaaattattaattttgacttttgatttttgacttaattctatccctgttccctgtgccctgttccctgtgccctgttccctgtgccctgttccctgtgccctgttccctatcccctatcagtttagcatactaagtatggtagagccaaaaatttttgttaataataattttatgttaggctaactaactatagcaggtctaaattaatagttttttgccacacctgctcaaaggcaattccctgtttagtagaaatatataataatactatagctgctgaacgtttggaattatcacaatgtatcaacagtggtttagggagttccctaataacttgaaaaatatggtttgctgctggatgtgtgagatttgcaattttggtaggcagattaatataggataatcctaaaagttgacttttttcctgttcatgttgccagaagcttggttcatctgaaaaacatagatttagcacagacttataaccatcatcagccagttgttgtagttgatctggtgtaatttgtccacttattgctaaatcctgattaatctttctgacaatattaattggcagcacattgtcaatcatagtttttggtggaaataataatatttttgatgccaaccccgtctccaactaggtatgaaaatttaatgtaggaatttcctagacccttattgtacaaatattaactgctatctagtcataatcattcagccatcggtttacatcggtttacttctgtacctaaaatatttaaatacaaagattaaaaataaacagatgcagataacattcctgaaattaaaatttctgaatctttgttattgctgctattggctgattactgattactgatagctgaatatttacatctagtcattaatctactcttaacttacagctagaatttgaggaagttgtgagggtagttgacactctgcgtcctcaaggattttataatcctaatattcttagctcttgtggaacaggcatcttgcctgttaaacttatgcaaattaaatgcacaacagcttactttatcttagtggttttggctcactcgattttcttataaaaattaaaaattaaaattaatgggggctttaaccgagtatatttcaacaattagacagcatttacagcagattgcagatcaatgaggtacagaatctaaattgaaatctatacaccaagctagttttactcctgactcctgctatatatagttttgttaaaccctcaaatatgagttttcctcacaagttcctcaaattttcagtttagtttcaaggtagacaccaggatactggaaactaggtaatggggactgggtactgggtactgggtactgcttactgggtacaattcattcccacaacttattcccttttacgaattacccagagttgagaaattctcaaaggttaattaatatgaaaaccagaacatttgccaccatagacggtaatgaagcagttgccagagtagcctatccactcaatgaagttattgccatttatcccattacaccatcttcaccgatggcagaatggtctgacgcttggatgagtgaacataaaccgaatatttggggaactgttcccacagtggtacagttgcaaagtgaagggggggttgctggtgcggtacatggtgcattacaaaccggttcactgactaccacatttaccgcatctcagggattaatgttaatgatcccgaatatgtacaaaattgctggtgaactgacacctacagtatttcatattgccgcgcgatcgctcgcagcccaagcattatcaattttcggtgatcatagtgatgtcatggctactagaagttctggttttgccatgttatgcgctgcatctgtgcaagaagctcaagattttgccgttatttccacccgtgcaagtttagaatctcgcattcctttcttacacttttttgatggttttcgcacctcccacgaagtagataaagtagaaacattaacaacagaagatttacaaaaaatcatccccatagaattagttatagcccatcgttcacgggcattaactcctgataatccagtattaagaggaacagcccaaaatcccgatgtttactttcaagcacgggaaacagtgaacccattttatttagcttgcccagatatcactcaaaaggtaatggatcaattcgccgaaattacagggcgagaatataaactatttgaatatcatggagatccccaagctgaaagaataattatcctcatgggttctggttgtgaaacagtccatgaaactgtagattatcttaacaaacaaggggaaaaagttggtgtaatcaaagttagattatatcgcccttttgacacccaaagatttattgatgctttaccaaaaaccacccaaagtattgcagttttagatcggacaaaagaaccaggtgcaacaggtgaacctctttatacagatgttgtgactgcaattcaagaagcaaatccaaaatccaaaatccaaaatctaaaattgattcttggtgggcgttatgggttatcttctaaagaatttacacccgcaatggtaaaagctgtatttgataatttgactgtggaaacaccaaaaaatcattttacagttgggattaacgatgatgttacccatactagcctagaatatgaccccgaatttaacattgaacctgatagcatagtgagggcaatattctatggtttaggtgcagatggtacagtcggggcaaacaaaaattccatcaaaattattggtgaagaaactgataattatgcccaaggttactttgtttatgactctaaaaaatctggttctgttacagtttcccatttgcggtttggacctcaacaaattcgctctacatatttaatcactaaagctaatttcgtcgcttgtcatcaatgggagtttatagaaaaattccccatgttgaaagatatcggtcctggtggtacattcctgattaattcaccttatgacaaagatgaagtttgggataaattacctgcttccatgcaagcagagatcattaacaaaaatctcaaattgtatgtgattaacgcctacaaagtcgcacgggaagcgggaatgggtggacatattaacacagtaatgcaaacttgtttctttgctgtttccggtgttttacccagagaagaagccatatcacaaattaaaaaatccatccgtaaaacctacggtaaaaaaggtgaagaaatcgtccaaatgaacatccaagcagttgataaaaccttggataacttgtatgaaatcaccaccaaagaaaaaactacccaatcaccaatcaccagtccccaatcaccaatacccgattatgcacctgtatttgtgcgtgatgttttagggaaaataattgcccgtgaaggtgatgatttaccagtgagtgcattaccttgtgatggttcatatcccacaggaacatcaaaatgggaaaaacgcaatattgcccaagaaattcctgtttgggaccccaacgtttgtattcaatgtggtaaatgtgtaatggtatgtccacacagcgttatccgcagtaaagtttatgaacctgaacaattagaaaatgcccctacaaccttcaagagtgcaaatgcaaaagaacatgattggcatgatttaaaatttaccattcaagtagcagcagaagattgtacaggttgtgctttatgtgtagatgtatgtccagcgaaaaataaagccgaacctaagaaaaaagccattaatatggcagaacaaagaccattaagagaaccagaacgggaaaactgggatttcttcttaaatttacccaatccagaccgtcgcaatttgaagttgaatagaattaatcaacaacaaatgcaagaaccgttatttgagttctctggtgcttgtggaggatgtggagaaacaccgtatattaagttagtcacacaattatttggcgatcgcatgatcgtggctaacgctaccggttgttcatccatctatggtggtaacttacctaccacaccttggacaacaaatgcagaaggtagaggtccagcttggtctaatagtttatttgaagataacgccgaatttggtttaggtttccgcgtttctattgataaacaagcggaaatagcagcttatttactccaacaacttgcaccccaaataggtgaatctttagtcacagatatcctcaacgctgaacaaaaagacgaagcggatatttatgaacaacgagaacgggtttctattctcaaacaaagattagatcaacttttggaatctgcaaccgaaaccaatctaaaatcccaaatcccaaatctaaaatccttagctgattatttggttaaaaagagtgtttggattattggtggtgatggttgggcgtatgatattggttacggtggattagatcatgtaattgctagtggtcgcaatgtgaatattctggtattagacacagaagtttattctaacaccggcggtcaaatgtccaaatctacccctaaaggtgcagtcgcaaaattcgccgcaggtggtaaacccgcagctaaaaaagacttgggtttaatagccatgacctatggtaatgtttacgttgctagtgtggcgatgggtgcaagagatgaacacacattaaaagctttcttagaagcagaagcttatgatggaccatcaataattattgcctacagtcattgtgtagctcatggtattaatatggctacaggaatgcaaaatcaaaaggctgctgtagactctggacgctggttattatatcgttataatccagatcgtgcagaacaaggacaaaacccattacaacttgattctcgtactcctagaataccagttgaaaattccatgtacatggaaaatcggttcaagatgttaaccaaaattgacccaggaagggcaaaagaattattgcaagaagcccaagaagatgttaatactcgttggcaaatgtatcaatatttagccgccagaaaattacaggaaaatcaacatcaagaaccagaaagtaagcctggtgaaaatcctaacccacaaccagaatcaactagtaaccacaaaggtgtaaccacctctaaccgttagataaagatggggtgatggggtgatgggggaagttaaccacccaatcaccaatcaccaatcaccaatcaccaatcaccaaaattatgaacttaactacaacatatctcggtttagaattaaaatctcctcttgtaccttcagcttctccactttcccaagaagttgataacatcaaattcatggaagatgctggcgctggtgctgtggtgatgcactcgctttttgaagaacaattaacattagaaaaatttgaattgcatcatcatttaacttatggtacagaaagttttcctgaagctttaacttattttcctgaacctacagattttcgcgttggtccagaggaatatttagaccatattagaaaagccaaagaaaaagtagacattcctattattgctagtttaaatggttcttctttgggtggttggactgaatatggtaaactgatggaagaagcaggagcatcagcattagaattaaatatttattatgttcccactgatccagatttaaccagcgcagaaattgaacagaattatattgatattctcacatctgtgaaaagtgcagtcacaattcctgtagctgtaaaactcagtccttattttactaatactgccaatatggctaaacgtttagatgaagctggggctgatggtttagtattatttaatcggttctatcaaccagatattaatttagaaactttggatgttgaacctcatgtacttttaagtacaccccaagctatgcgtttacctctgcgctggatagctattctttatggtcatattcagggtagtctggctgcaactagcggtattcataacgcccatgatgtgatcaaaatgttgatggtcggggctaatgcaactatgctgtgttccgtattattacggcatggtattgatcatattcgttccttggaaaaggatttgcgggaatggatggaaactcatgaatatgaatctgttaaacagatgcaaggtagcatgagtcaacttaactgccctgatcctagcgcctttgaacgcgctcagtacatgaaagctttgcaaagttacaaaccagaatcgggtagacagctaagaatgtcaacgcagatgaggtgattagggattggggactggggactggggaagaaaattttagattttagattttagattttagattggagttgacaaaaacaatccaaaatccaaaattcaaaatccaaaatccaaaatacataactcctgactcctgactcctgactcctgactcctgactcctgactcctgactcctgactcctgactcctgactcctgactccttgaactcctgactcctgactcctgactcctgactagctaactaataactgataattgatatctaataactaataatattgctgcaatggtttttaattggttccgccgtaacgattcttctcaaccccctcaaacacaaccacagggggaaactcagcctacacaagaagcacagccagaaccagccgcagaaactacacctgatactgcggacctattggcttatgctaaagctgcttataaaaatattcagcaaaaacaacaatctcagccccaagaaactgcaccagcagaggcatctgttattgaagaaaaagcagaaacagttgttgtagaagaagcagttacaccaaccccagcagaaacaactgctgttactgaagatgttactgaagaaaaagcagaaacatctgtagaggaaacagttacaccaactccaatagaaacaactgctgttactgaagaaaccgcagcagcgcccgcagaagaagtaactgtatcaacaccagtagaagcaacatctgatactaaggaattagaagttactagcccagaaactccagttagtgatcaacaaccagcaactttatcgtttttagaacgggcagcagcagaaaggcaagccaaacaggaaagattgatagccagtgcggttgaagttgcacaaccggaaataacaccaacttcaacaccaacttcaacatcaacttcaaccacaccagaaacagcagcagaaattcccgttatagaatttgatgatgggtttgtatggtcagcagaagttttagcagcacaaggtagaaaggccgaagatatttctatagaagaaattacctggttgaaaaaattacgccaaggtttagataaaactcggcgcaatatccttaaccaactcaaagccattgttggacaaggaccattaaatcaagctgctgtaactgaaattgaggcattacttttacaagctgatgtgggtgtagaagccacagattttattattgatgctttacagcaaaaattgcgggatgaagtcaccccaccagaacaggcgatcgcctacctgaaacaaatcctccgggatatgctagatgcaccaattgcagcagcacccagatccagctttgccccagaaaaagataacttaaccatttggttaattacaggagttaacggtgctggtaaaactacaacaatcggtaaaatcgcccatttagcccaaaaatctggctataactgcttaattggtgctgctgacactttccgggctgctgctgtagaacaagtgaaagtttggggaacaagaagcggagtagaagtgatagctaatcctgggaagaatacagatccagccgccgtggtatttgatgcgatcgccgccgcccaatcacgaggcacggaattattattagtagataccgctggcagactgcaaaacaagaaaaacttaatggacgaattaagtaaaattcgtcgaattattgacaaaaaagccccaaatgcccatgtggaatctctcttagttttagattctaccttgggacaaaacggactgcgacaagctgaggtattttcccaagctgcccaactcagcggcgttgtcttaaccaagctagatggtacagctaaaggaggagtagctttagcagttgtacaacagttaggcttacctattcgctttattggtgctggagaaggaattgaagatttacgtccattctctagttatgaatttgtcgaagcacttttaaatgggtgattggtgattggtgatacaattttggattttggattttggattttggattttggattttggattgtatttcatgaatcaaatctaaaatctaaaattcttctgcctcctgccttctgcctcctgcctcctgcctcctgccttctgcctcctataaattaaaataattctttttttttgacaaaaaatggccaacttctggtagaatttcacactaaagctatttttatcactgcccaatgatccatctaatacagcacaaggttcattgatgactgtaaaaggtattcatacacaagtggatgagtgtaaacaaagtagctaatgactctgacttggttatcaggttctactggcaaaattacatacaaatactctctcttaaccatttacagatgtaaattatcatggtttaactaaaacactcgatataggttttggttgaaagattccagagtatcctgagtctaggttctatttcctatagatgctagatattttgtcttgagctaaattacatatttagccattcaaaatttcatagctaatcagctaataaactgaatatagaaaatttatatctgagtaaatattcaggaaatttatgatataccagttaaatgtttacaatttattacttgtattttagagtttacaggtaggatgagaaatattttttgtctcactccagtaggaacacccggtttaacaagccagtctcaaatccattcatcgaaaaatctccagacttactctgtaggtgtaagcaacgactctgattaaaagaaagttttatttccccagatatatgaattactaattaaggcatgaaaaaattataagccgtctgtagcattatcaaaattactgctttatactagacagggtttaactaaaaatacaatgaccggaaactcctgatcaatggcaaacaataaaaccagcaaatgcaatactgttcaaaattacatcctcaatttttctcctcttgctaaaatgactaatcttgtcgaatatgattgagcaacactaaataaaaaattgctcataaatcataaatctgccatctgttaatattaaatgcaatagtatatttacctgtgtctcaagttccttctcactccaccgaaattaatagtagtgccaccacagatgtcactccagttgtggcactaaaagaacttgtggctagactgcatcgggaacagaacaaaattcaagatttgctgagttctttaggatttgctctcagaagtttcaataatttgaatcagtttttagaactgattcctctcatggccaccagagttaccgatgctgaaggtagcgccctatttctctataaaccaaatggtcaaattaggttagagcagctacattggcagaatagtcaacaacggaaaattatccgcaaagccctagaaaatgctacaagtcaaattacactgttacctaattctgcaccactgacaaccacaggaattttagatgctcagatgcatcaatatttaggaccagatgtgcagatttttggtacagcaattatagttaaacatacagaaaggggatggctttatgttttaagccgtgatccagaatatagttggacagaaactagacaaaagttagtaaggttagttgcagatcaaacagcggtagctattgacaacgatgaactagcagtagaattgaggaaaaaagaacgattagatcaagaattagaaattggtgctgagattcaacgccgacttttaccgcgtcaatgtcctaatgttcctggtgctgttttggctgcacgttgtaaaccggctaatcgtgtgggtggagattattatgattttattcccacaaatcataatcagtttaaatctaatcttaatagcagtaaagaagatgcccgttgggctttggtaattggggatgtgatgggtaaaggtgttcctgctggtttaattatgaccatgttgcgaggaatgctcagaggtgaagtattacatggtaattctgcggcgggaattttgcaaaatttgaatcgtgttatgtatgccgatttggaaaattcccaccggtttgtcactttgttttattcagaatataatccccgtacaagattgttatcttatagtaatgcagcacataatccgcctttgtggtggcacgctgctactaagacagtgacgagattggatactatggggatgttgattggtttggatgcaaatagtcaatatgagaatggggaagcacaattagaaccaggggatacagttatttattatacagatggtttaacggatgcggctgcggctggtggcgatcgctttgatgaagataattttgtgacttcgtttaatgctgcttgtcgttattgcaatggaccccaggaaattgttgattatttgtttgataaggttcagaattttatcggttctgaacggcaaaatactgatgatatgactatggtagttttacaaattttgtgattacaggaggcaggagtcgggagatcaaactgacttttaaactcattttgaactcattggtcaatgggacagatattgagttataataagtggtcgcaaacattagtaagttatagccggatttgtcccggaggtacgattgaccacaaaatttatcttaaaaattctctggttagatgagaacgtagctttagcagttgatcaggttgttggtaaaggcacaagccccttaactaaatacttcttctggcctcgtaatgatgcgtgggaagaactgaaaaaagagttagaatccaaacactggattactgatgttgatcgcgttgagttgctaaacaaagccacagaagtgatcaactactggcaagaagaaggcagaaaccgcccaatggcagaagcacaattgaagtttcccgaagttgcctttacaggtagcgcctgattgttttaatttggtgattggtaattggtaattggtaattggtaattatcaattactacccagtcccgatcttccaattattccatagtttaatggttttatcttcactacacatattcttaaaactcctgtggtgcagtcatattgcctgcataaatcataatataatcattataatataattagggtttgctgaataaacctaaaaccttgatatatcaaaggttagaggctgataaacacagaaattagtgcaagggtttggaagggtataccggaaaaagtgtgcattttttgggatttcaagagatggcaaagaaattttcaaatctcctcctgactcctgactcctgactcctgactcctatgccctcacggaaagactttctcagcaacccctacataaaattcattagaataggctacttccacagtcatgtatgatgtagtcattggttggagatgcaaaccatgactacttacaacattgaattacaagcgggaattttacggattaaatttggcgaacctgcccaaaacgaccaaatagtaaaagatgcagcgacacgcttagaggaaatggcgcagtcgggagaattagcagggggtcaattataaggaaaaaggctgaaaacccttgaggttaagttttggagcgtggcggagaaacttaaccgtcctttaggcaaggcatgaaagccagttaaggcgtttacgcctcagtgattttaactattttctttgttgggcgatatagtgtttaactgtttccgtacaaatattaccagcagtgctaacaaaataactaggagtccacaaagtaggaagtttcagtaactcaggaaattcttttctcaagaaacaa

SEQ ID NO: 79 - DNA, 22812 bp, Sphaerospermopsis sp. LEGE 00249
  LEGE00249_97
aggagtcaggagtcaggagtcaggagtcaggagtcaggagtcaggaggagatttgaaaatttctttgccatctcttgaaatccccaaaaatgcacactttttccggtatacccttcaaaacccttgcacttttttcctgattttccacctgaaacccttgatttatcaaggttttaagtttattcagcaaaccctaattatgagtagagttattttagtaacaggtccagcacgttcaggaaaaagtgaatgggcagaaaatttagcaattcagtccgggaaacaggttatttatatagcaacagcaatggaaaatccccaggatcaagagtggcaagaacgcattgaaaaacacaaacaacgtcgtctacaagattgggtaactctttgtgtacctgtggaactggcggacactctcagtaatgccaaatctgatacctgtattttgattgattctttgggaacttgggtagctaattttttggaagaggatgatttaagctgggaaaaaaccttagcagaattgttaaaagtagtacgtttaattgatgctgatttgctgtttgttgctgaagaaactggttggggtgtagttccagcttatcctataggtcgaaaatttcgcgatcgcttaggtagtttagtccgtcagttaggtggaatatgtgaatcggtttacttagtaactggtggtcatgttcttaatctcagtgttcttggttttcccttaccaccaagcaaatcttaatgcaaaattaaggattaatggactcagattccctcatttaaatctacaattaatgatatggcaaacacacaaaacgtaaaaaaataccttgcttactggtttcaattagggaagaaagtgatagtcggtcatagtaatcaaagtttcttgcctaacccagtgctaaagggcgataactatagtccagagtttgaagagtgttggcaacaaattcttgccttagaaacccgtgattgttatttagaagatactcaagaaaacatagccgaactgctaaccccaacttgggaagtcctgccttgtgggcgctgcgcgatgccagtacctgttaaaactatgggaatgccatcaatattgtgtccttgttattatttgcctacttggcctaataatgaactaccaccgccaagatgtccagttaatactcaacaacaattgatagaaattcgcgatcgcttgctggaaaatgtggcttcatcaatttaacaatttgttcacaaaataagttgttaaattattttttgaaattatttttgattttcactcataattgcagagatcccgacttctttaaaaagtccgggatctttttgtttacttgctttcttccaaaatcaaaatcgaatccgcactgcatccaaactcttctggtgtatattgcatatacaggacaaagaaatgtttccatcgtcacagaaagaactaagtagggtttgctgaataaacctaaaacccagatatatcaaaggttacacgctgataaagaggaaaaaagtgcaagggttttgaagggtatacctgaaaaagtgtgcattttttggaatttcgagagatagcaaagaaattttcaaatctcctcctgactcctatgccctcacggaaagactttctcagcaacccctacttacgaaaattctactgatttccatttatcgtctgtgtatgatgaatggttagcaaaacagccaacctcaaattttgtatctgatcagttaagaattttatcgcctagtgatggaaatttatttctgatctatcctagtgcagaaacgcaaaaaaattagcatttcaacttacaataaattctcatcagcctgtagagtcgtagctgaataggcaaaggttatcttcaccatcaaacacaaaatcaaataatgagatattttggcatttacgccctggtaattatagactgtaagctagaattagtaagctttatagctaaataaattttcaagttatggtaggagagaaaaaccctataagaccaggtttttctgtaattaaacccactgtttctcatgtttattatcattaaacaattttgccaaaaaataaaatctttcttccggaatgtgtctaaaaaaaagtgatgttataaattaggactgaagtttttatccaaggtatcgaacaatgacaaacgcactagaaaacaaatctgctaaaaaggcaaaacagtcttttattcgtgttgatattggcgttcctaaagtgccagtccgtaaaaacaacaccaaaaagcagcaacgtgaattacttagtgactgggaacacgccagttaatacgattttggattttggattttggattttagattgtttaaggcttgctagataagcttttcgtctgtcgccatcattttttcacatggtataatttgcaaaatacaggtgacagcaaagaaattaacttaacaacaagacagtacaggctgaaaaattgttaaattaagttaacagtgaagactgtacaatgtgcttgagtttaggttaacaatgaaagtagcgatcacgggagcaactggttttgtcggtagtcgtctagttaaacggctgcaagaagaaggtaatagagtattggtgttaagtcgaaataccaattctgcccacaaggtttttccctctcaggctttcccaaatgtagaaattagggcttatacaccaggtgtatcaggcgcttggcaagatgctgttgctggttgtgatggtgtggtaaatttggcgggagaacctatcgctgaggaacgttggacaccagaacgtaagcaagctattctcaacagccgcaaactcggtacacaaaaagttgtggaagctatagctacggctaaccctaaaccatcggtattggtaaacgcttcagctataggctactatggaactagcgaaaccgccagttttgaagaaaatagtccttcaggtcaagattttttagctcaagtttgtcaagagtgggaagcggaagcgcagaaggcaacaaatgccggtgtgcgcttggtaattttgcgctttggcattgttttaggtcatggcggcgctttgggtaaaatgattactcccttcaaactttttgcaggtggtcccattggtagcggtcgtcagtggttttcgtggattcacatagacgatattgtgaacttaattatccaagctttaacccagcccaaaatgcaaggtgtatacaatgccactgctcccaatcctgtgcggatgagcgagttaagtaatacaatgggacaggtgatgaatcgcccttcttggttgcctgttcctggttttgctttggacgcattattgggagatggggcaattgtagttttagaggggcaaaaggttttacctcaacgcactcaagcaacgggttttaattatcaatatcctaatttgcaatctgcattaaaggaaattttgcaataattggtgatgggtgatgagtaatgggtaattggtaattgggaaacttccttctattacctattccccatttccagccccaacagatataatcaatatctcaaacatgatataaacaataaacaagaacatctctggtaggtaaattaaaggctggtgaatcaattgaggatcttgcttttgattataagtgcgatcgcctgaaaattgaagaagctattcgctgtgaattacctgttgttgcatgaccacacctaagtcaattaccttttttattgatagatgtttaggtacaggaactgtacccgaaaaacttcgcaatgcaggtattttagtagaaattcacgacgaacattttggtcaaggaactcaagatgtagactggctaccagagataggtaaaaaaggttgggttgttttaactaaagatgatagaatcagtagaaacaagttagaaagaattgctgttgctcgcgctcaaataaaaatgtttattttgatttcccaaggtttaaaaggcgaagaaatggcagaaatttttattaaagcaattgacaaaatggaaaagtttgttctcaagcatcctgctccatttattgcaaaagtttctcgtgaaggtaaaattaatccttggaaaacagtcagatgttattacaagaaatagagcagtttttatcctaactaatttttcccaaatttcttagcaacccaactactaataccactaattaacgcccctcccattaaaagaccaatagctgggttaaataagggttgccaaagtttatgccataaatctaaacctaagttgatgcctgaagcatcgccaacaacagcgacagcaaaccaaccaaatcctaaaattactaggaaaaaatcagcgactaatattgtatttacccaatttaatattttatctttcatcattgaatagggaacagggaacaggtgactggggactggggactggtgactggggactggggatagtaagagatttaccaattaccaattaccaattaccaatcaccaattaccaattaccaatcaccaatgattcttcaaacagccatgttttgactttagccaaactttgccaatcgagttttctagttaaaccgtcttcaatgctgttttttacttcttcttcccattcttgattgacaaaaatcaattgttttgctatgtcgatatgttctcgtaaacctttctgaccggtttctaacatggctacagccagattaattcgaccttgtggatcttggggattaatttttacggctttgctggcagctttataggctaactgtgctttaccttctagaagatataaccaagataagcaaatccaagctgaactagctctaggagagcgatcgcatacttctttaaatacaggaataagatttgcggctgattcaccgtctttgtagcgttgtaaacctgtatcaaataattcttcaactgtaatagtcatttgttatttgtcgttagtcattagttatttgtcattgggcattgggcatggggcattggttatggggcattggtttattaatctttcccaatgcccagtcaccaatcaccagtcaccagccccctattataccccaaaggatttaccgcaaccgcaggtttgagaagcgttggggttggtgaactgaaaaccaccaccaatcatggcatcactgtaatccagcatcaaaccatagagatataataaactcttgcgatcgcaaacaattttaaagccgtcataatcaaaaacttcatcctggggagtgatcttgctgatatcttcaaaatccatcatgtaagacatcccagaacaaccaccttgacgaactccaacccgtaaacataaatcttgaccttgtttagcttggagagattttacttggcgcaatgctgcttcacttagcataatgccgcgttcttgagtttggattgcttgtgtcatctgctgtttacactccttaattagtctaaatattaactggtatatgccgttgatagcctggatgctgattttttgatttttgttctattttagcggcattggtgaggtgaaaacgttaaattctcaatactttgtcaacagcagccaaggaattttattctaaaattgagaggtttggtgtatttagagatggggtattttctgagtttcagccacaagcagtctgagcagcaaccactcttcaggtacagtagggttattaacagaaaacttgagccgaattttagccattccccacatttgacttccaaatagctttttttgattcacttaatctatgacaagttttaatcgctctaccagtcgtcggttgaagaaattaatccaaattccttctatatgggagggcgatcgccgtccgttgtcatcaccagtgtcatccagagattcccaagagtcccaaggggaatgtatcctttgggtggatggctctcaaggtattgttagaggtatggatatggtatctcccgaccttggaccagaagcaatagttcgcaccttaatgcgagcaatggagcatccccacagtcctgctaaaccagctagacctcaaagaattgtggtcaaagacagggaaattcaattttacctgcggggagttttgcaagatttggatattgctattgactatgcaccagaattacctttaattgatgaactatttcgctcttttgcggatatagttgatagtcaaattcctaatttacctccaaaatatgcaaaaattctgaatgaaaaggcttttgcagtttgggaagcagcaccttgggattttctggaagaacagcaaatcttgtctatagaaataaataaatgggatgtggggacactctatgtctcagtcatgggaatgctggggatggagtatggtgttttgttatatcgttcagaagaatctctcaagcggttccgtgcagatattttagaggatgaagaatcagagcaaggtttagaagcagctttcttaaagcaagattgcttatttctcacctttgatcaagtggatgaagatgaagatgaagatgaagatttagcggatttacccctatcggagattgaacctacttttggtaatattcaccccttagaaggattacgctcgattttatatgaggaagaagcacttgtagtatttgtggcactagaaagtttgatccgctttatccgtgattatcgtcatcagttatacgaagaagacttcccccccatcaaccgacgttatcgcatttctctaccccatcccgatgaaacaactaaatccgtgtctgtcactgtctcgactatgccagaattagcagcagagttagaggaaatggcagggtttgatttttcagatgaagatgagtgggatgaggataccgagatccgcacattgcgggatgatttgatcccagaagattcatttttgagtttaggagtgatttcttgggagatgttgaattctctacgtcaggaagtgaattatcatgcaggacaggaaattcaacctgtcggtgatggtttacccgtgattttaattcaaacttcccgccccaaagctaaaacggtgattgaaaatattcaagctgctggaggattgaaagctatatgctttaatccaggtgctaatcccttagacggtgaacgatatgatttaggtttgttacaaacagagaatggggatctgttcctgtttggggaatttccagaggatgatcccactcacgttgaagccaagaaaaaatggaatcagcggtgtcagcaaactaatggatattgcggtttgatcattgctaagggattgacaggtgctgctcgtggtaatccagggttaaaagatatgatggctttgtttgaagcgcgatcgctctctactcaagatttaggtattggtactctccaacttatgccccaactagaatttgaataattttctgtgtagttaccacagatagtcatcaaatccacactgagttcaattattttggtttgatctgtggttttctacaatgaagtcctatagtaattgctgcataatttgttgttaaaaagatcaacttggttcgtttagtttatctatcttgacggcgaatttttagttatattttatgatcttcgtgtttatttgagcaaatctctgatagtatcattttttcctttgacttttggattctttttgacaaccgttaacacatagcaagttgcatgataatgactaataaaaaatgggctgttaaacgcataaccgtcaacctagcaactcaggaagcggaaaaattagaaaaatattgtcaacagactggtagacccgctactgatgtgattcgtgagttgattagaagtttacctctttctgaagatagtaagagtaatgcttaatgaggcattgggcattgggcattgggcatgggtaaaaatcttttcctcccctgcctcccctgcctctcacaggggtaggtttttaatattatctgttgaggcaggactaggaagacaaggagggaaagtagacaaggaagattttctccgcacaatagtctttttgttaccaagataatatgattttgtacggttttcctcccctgcctcccctgcctcccctgctccctctgctttcttcccagtccccagtcacccatccccagtctccattacccattacctattctgacaccaacccagttacaatttgtaaagaaacttatagcgcagcttggcgtaagtaatagaggaacttgggaatgcgtgttgcaattgtaggagcaggattagctgggttggctactgccgtagatttagccgatgcgggttgtgaggtacaaatctttgaatctcgtccctttgtcggtgggaaagttggcagttgggtggatggtgatggcaaccacatagaaatgggattgcacgtattttttggctgctactacaatctgtttgagttgatggaaaaggtgggagcagggaacaatttacgcctgaaagaacatacccacactttcatcaataaaggaggacgcactggggctttagattttcgttttatcaccggtgcgccttttaatggcttaaaggcatttttcactacttcccaactttcagcactggataaactgcaaaatgcgatcgctctgggaactagccccattgtccggggtttggtagactttgaaggggcaatgagaaatatccgcgatttagacaaaatcagtttttctgactggttctatagtcacggaggcagtaaaggcagcatcaaacggatgtggaatcctatcgcttatgctttgggctttattgattgtgatcatatttctgcccgttgtatgttgacaatcttccagttttttgcagtcagaaccgaagcgtctattttgcgaatgctggaaggttcaccccacgaatatttacataaaccaattattgaatatttagaagccagaggtacaaaaatctatacccgtagacaggtgcgggaaattcaattcactgagtctaatgttcttggggaagcagaaaccaaagtaacaggtatagtagttgcccaaggtgacaaagaagaagtaatcacagctgatgcttatgtttgtgcttgtgatgtaccggggattcagcgagttttaccccaagcatggcgaaaatggtcagaatttgataacatttataaacttgaagctgttccagtcgctacagtacagttaaggtttgatggttgggtgacagaactacaagatgcagaaaaacggaaacagttaaatcatgctgcggggttggataatttgttatatacagcagatgctgatttttcttgttttgcggatttggctttaactagtcccgcagattattatcgtcctggggagggttcattgttgcagctagtattgacaccgggagatccgtttattaaagaaagcaacgaggcgatcgcccagcacgttttaaaacaagtctatgaattattcccctcatccagagaattaaacatgacttggtatagtgtggtgaaactagctcaatctttatacagagaagcaccaggaatggatgtttacagaccggatcaaaaaacaccaattcctaactttttcttagcaggaagttacacccaacaggattatattgattctatggaaggtgcaacaatttctggaagacgtgcagcaaaagtcattctagaaagtgtgaagaattaggtattggggactggggacacttcgacaagctcagtgcatcgctggggactggggactgggtaaaggttcttctgaattaccaatcaccaattatcaattatcaattatcaattatcaaacaaatctaatggctgactggttagaacatagcgtacaggtagaagtagaagctcccatagaattagtatgggggttgtggtctgatttagaacaaatgccgaactggatgaaatggattgattcggtgaaaatttcccctgatgatccagagatttctttatggaaattgagtacagggggtttagaatttacctggaaatctcggattcttaaaacaatttctcatcaaattattcaatgggaatctgtggatggtttacccaatcaaggggcaattcgtttttatgatcgccatgcaggtggtagtattgtgaaaatgactatttcctatgctattcctggttttttgggtaagttgatggataatttgtttttgggaaaagctgtagagtcaacaattcaagcggatttggagaggtttagagaatacgctttgaatgcgaagggtgatgggtagagatggggaaaattggcagtaatcagcctttataattggctaattactgtcttgaaaattgataatttagtatcaaaaaatacaagaaagctgcttatatgtctcaattaaacctatttgatttaccagaaaaacagaaaatatcaaacactaatttggaagctaatcaagctagtaaaaatttatgtactaatctatttaccaatcaatactctattcatagatggtacaattttatcgctgggttttctcctgaatttgtgaaattttgcataaaagctgcacacatcaatagtgaagatgttgtcattgatcctttttctggattaggtactacactggttgaagctaatttgcaaaatgtttcttcaataggatttgaagctcatccttttttctatgacatatcacaagccaaaatatttcctatattagatacagaaaatatcaagtatttagagaacctattattatcaattaaaccttatactggcaatttccaagaaatatggactgaagacgctttaaaatttttaactaagctgattgcagaagataatttaactttattagcaagttgtctagaaatagaaaatcagcttgatcaggaaaataaatcattatttcggttaatagtttccaaggttcttgaacaaacttctttagcacaaactgatggtatttataaagcaccgactactttaaaaaaatccatctcttttgatgattctgtttctagaatatgtaaacaaatatatgaagatgttgaatatttacaagctcaaaatactttcagttttcaagctaaattaaatttttgcagttcagaaaatatgcaatctgtggacaatgaaagttgttcactttgtataacttctccaccttatttaaataactttgattttgcagaaatgaccaggatggaattatatttctggcgttatgcgggttcttggagagaaattacagaaaaagttcgtcgtcgtttaattgtgaatacaacaacagcacctacagatttaaaaaggaatcaagattttttctcttctacattatcaacaagattcaagttaaaatatttagattctatcatagcagaattatttaatgaaagaaaaatcagaccaggtaaaaaagattattatttattgatatatccatattttgcccaaatgcaaaatgtaattagagaattacagagaatactgcgatctagtagtaatttacatttgattgtttccgatgctgcactatatggcgtttatattcccactcatgaaatcttgagtcaattaatgatagataacggttttcaaattatcaatgtagagaatatgagaaaacggggtgaacgctggttgctaaaaaaaaggacaggtgcaaataaattaggagagtatcatattcatgcaaaaagaatttaactcagatttagatattgataatactaacgatcttgatgaaagtagtagtacactatatgctattgctatggatttcataaaaagttatatagatgtttatttaaaattagtaaatgaaactaagggttttgctgtagttgaagctaataatgcccaagattatgaacagaaattaataattttaactggaattaatagcaatcttgacccgctaacttcaacggcaaatgatgtagttcaagaatggcaaagacgacaagcaataatttttgatgtagaagcatccataactaaaggtgtttatatacaaatgcgagaggtagcgcaaaatttaattgatgaattacgtatatctacaaataattttcaagtttttgaagctgattatattaataaaaatccgagaatgttaccaatttttcagaggttgattaatgtcagaagtaaatctgaattgaagaaaagagttggtaatgtttctgataattctatatcaaagccagcagctaagagattagctgatattctcaacagtaacacaactaataaaaatatagatgatcaggaaattttacaaggtttggaaacaacattagaaggaattgtgcgtgatttagtcggtagagtattactagaaagtatagtagctacagcacttgatgaagctaatgttccttacaaacgagaaaaggaatacaagtatttagaaggagttatttataatttccgatctgattttgttgtacctgatgaaaatgaacctaaagcatttatagaagtaagaaagtcatcctctagacacgcttctttatatgctaaggataaaatgttttcagctatcaactggaaaggaaaaaataaagatattctggctatattgattgtagatggagaatggacggctgaaactttgcgaattatggctaatgtttttgattatgttgttcctatcaaagctgtttcttcggtagcaaattctattgctgagtatttacaaggagataaatcaaagttgaaatgggtgattgatttttctattaaaccagcaaatgaggaagttatgcttgaagatgaataaaaattatttttcaagtagagacacagcatcaccatgtctctattacttcctgacaactaaaaaaaacaatcaaaaaacaatcaaaaaacaatcaaaaaaataataacttaccaagttggatcactaaaaagatgaatggttaattcctctttatttggaggaacaggagtaatacaagcacggatgatttccccatcgtctaactcaacagtgcaagcgtgacaagttcccattaaacaaccagtaggaattgatactcctgccctctctgctacatctaataaaggttctccaacttcagcttcgacggtaacattatctggtagaaaatggatcttcatagtcattggttgtggataattaatgtcagaaaaaaggtagatattcagatttttgctgatagctgaatactgatagctgactgcttacaaaaaaggcgttaaatctaaatgggtttctacttcggtagctaaagaatctaaaatctgttctcgttgatctcgataattagcaacacctgtgggtaaagattttaaacctctttgttgacgtaaacgatttaaccatgcacgtctccaaggaccattatcaaaaattccatgtaaataagtcccccaaacagattgacaattatcaactaagcctaaattaacatcgtcaaataaaggttgacatacggttttatctgttggttgttctacacgcgatcgcccttgatgaatttcaaacccattcacaggtaaacccatctgaggataattagaagtcacctgacgttgacgggctattttctgtcctgtgatcacagttttcatcggtaataaatttaaccctgcatatctgccggcttgcccttctaatccttctgggtcagctaccatttgtcctaacatttggaaaccgccacagatgcctaaaaccgttcccccagaagcagcataattttgaattgcttccgccataccacttttttgcaatagcattaagtcggcaattgttgtctttgtccctggaataattactgcatcagggtgtcctaactcttgcttaggactaaggtattttactgaaactgttgcttctgattccaatggatcaaagtcggtaaaattggcaattctgggtaagcggataacagcaatatttaattcagcttgacttttataagattttctctctaacaagtccagtgagtcttctgctggaaatacttgttctagataaggtatgacaccgaccacgggaataccagtccgttcttctaaccatttaagtcctggttcaaggatggaaagctgtcctcggaatttattaattactacccctttcaccaattcgcgttcatcaggttctaataactctaatgttcctactacatgagcaaaagctcctccccggtcaatatcaactactaacagagtcggtgcatttaaatattttgccaccctcatgttagttaaatctcgatgcttgaggttaatttctgctggacttcccgcaccttcacaaacgagtaaatcaaattctgtctctagctgttttagcgattcctgaattgtgcgccaaccgagttcaaaatattgctcgtaataatccttagcactaactttacctaccgctttacctttaagaatgacttgagaagtcatatccccttggggtttgagtaaaatggggttcatttccactagaggcgttacccccgcagaccaagcttgcactgcttgagcataacctatttctccaccattggcggtgacataagcatttaaagccatattttgacctttaaagggtgctactcgccagcctcgccgtgagagaatgcggcaaatagctgtagttatcagtgatttccctgcgtgggatgttgttcccactaccataattgatttcatagggtaacttgtttgttttttgagtgtcgctgtaatttttgagttaaaggtttttcaataatggacaattgacagtgaacaattgacaattacctctctctggaaaggagaggattgaaaaagcggaatttttggcttttttgccccttgaaaggggaggttttaaaccgtatggctaacgccacgctacgctatcggctgacgctcaatgcggaagccttgaatgaaacaattgtcaattatcaattgtcaattatcaattgataatttgctaatctactcattaaattggaaaaaagcagattaaaaaactaggttagagcttattgttcccttaacctagttttcactttgacttgcttatctaaagatgtcaattttttccgctaaaaaggtagtcgaaaccaacgagtaatagcatcatttaagcgatcgccccatgatggaccaggcaagtctgtatcccagaatttttctaccaactgataacccaggggtgtgaggcgaaaaccgtcggttattccctggccatcgacttctctgcgtagtatccccacttcgattaaccaacctaaagcgttatcacaggctaattctgataaagggcgtttggtataaccttgcttaaagccattttctgtagcgatcgcacccaaggcaatactttggctttgcatagctttccataaactcagatggaaaggtgaacagatcagcgatcgctcggctcttaggagtgttttctgactatatacaaagggtttggagtttggagaatttattgtagtcatagggcatagggcatagggcatagggcatagggtgatggggaggcctgacaggggtaggtttttaatattatctgttgaggcaggactaggaagacaaggagggaaagtagacaaggaagattttctccgcacaatagtctttttgttaccaagataatatgattttgtacggttttcctcccttgtccactgtccttccttgtcccccaagtcttgccctcacgacaatgtaaaatacctacccctgtgaggatggggaagtggggaaagtgaataacccaatcaccagtcaccaatcaccattcaccattccctaacaattgtaaattattgtaaaatttccacagcatcaatattctgaaacaggaaaggtgaattatggcactagcagttggtacagatgcacctgcatttaccaccaaagatacaaacggcaatacaatatcattatctgattttgcgggtaaaaccgtggttctgtatttttaccccaaagatgacactccaggttgtaccaaacaagcttgtagtttccgggatgcccaacctgaatatcaaggtaaagatgttgtagttttgggagtaagtgctgatgatgaagcctcccatcaagcattcaccgctaaatataatctcaatttccccttattggctgatactgatcaagccttgattaaagcttacgatgttgatggtggtggttatgccaagcgtgttacctatgtcatcgatcctaacgggaaaattattcatgttgatggtgctgttaacacaactacccatgctagtgatgttttaaatgcacttggtttgtaataactagggtttgcaactagggtttgctgaaaaagtctttccgtgagggcataggagtcaggagtcaggagtcaggagtcaggagtcaggaggagatttgaaaatttctttgccatctcttgaaatcccaaaaaatgcacactttttccggtatacccttcaaaacccttgcactaatttctgtgtttatcagcctctaacctttgatatatcaaggttttaggtttattcagcaagccctaactagggtttgctgaaaaagtctcttcgtgaaggcagggaatagggaataggcaagagtttgggtgatctgttagtaaccaattctttgaaatttcacccggaaaatgcacgcttttaggagtatacccctgaaaaatcctgcactgatttcctgattttccacctgaaacccttgatttatcaaggttttgagtttattcagcaagccctaactaataattttccataacctcaacttcaaacccaaccaggatgagaagttgaggttttgactgttccaggacttacgcaaaacagaacaaaagtaggggtaattcatgaattacccctacgcaagaatcagcttttattccaatcttgtgtaactgctattttcattgatctgaagcaggtaaattgatcaacggtgctgcattttcaccggatgtagttggtgaagttgtagttggtgaatttgggtttggttgttgctgactttgcagaagtttttgttgtctggctttaaacgctgctgctgcgtcatttagctgttgattttgttgttcagaattccagttgagagtgccgaaatttgcctgatgaatcaggttaaacatattgaaatctgaaccattgccgaagattgaattgctatttttatcagtctccaaagtagcaaaaggttgatttggattagctaaactcggtggtgctactaaaacagatgcaaagctaattcctgcgaaagtggcaactaagatttttggaactggtaaaaatggtttgttcatgagatttcccctcacattttgcctcctttaatcatgcttctatactaagccagtgtcttgcgtagttggggttgaatgctgagtaaagccactacagcaaatcctagtaatactaacaatgctcccccaaaggtgacatcaccccagaaagcgtgcatgacaacatcacttaatccccaattactgtttagatataagtagcgtatgggttcaattgcatagctgagggggttgagggtagcgatcgcctgtaaccatcctggcataaaggataatggtgctaaagctgtgctggcaaataataaaggtaggttagtcacaaaaattactgcaattaattcaatgtgtcctggtaaagcaaaggctaaaccgagggaaatggcggtgacacctaaagctagtagaaatactatgagagcgatcgcccctagcccggatgcatccggtaaacctgcacctaaaaatgccgctgcaccaacaattacagccgcttgcagtaaactttggctaatgataaagatagcagaagcaaagacaattgagaaacgagaagctaaaggtgctaccagtagacggtttaagaagccaaattccctgtcaaacatcacaggtaaaccggcatttaacgccccagcaaaagcggtaaagacaattacaccagccgctaaaaattgtccgtaatttgtcgtactaccaaataaaccctggggcgcattttggaataatgcaccaaacaacaccaaccacatcactggttgaataatccctgctgctagagtagaaggacgacgttgtaattgaataaatagacgacgagttaaagctagggtttcttggactatttcccccaaaaagttgggtgtatttttggcaactacggtctgtgagttgagttgctggaaattgatatctgtcttcatagggattttcagattagatatacagtagatatacagggtgtaaacttaaaaagtccgaattataaacatttttgcacttgggaattagcccataatcacaataatatttataattcttaatattacattatatcaaaatatgatgtaaaataatgttgacattgttgacattaataaagatttagctatagatatccattgactgggagcatcccaaatgtgtaaatttatttttatctagggaaataaaatgctccaagacttgatatgattgaaccgcaaaggacgcaaaggacacaaaggtaagagattgtgagaaattgtgagagattgtgagagattgtgagagattttttagtgttgttgcgtttattttgtcaaaattgggatgctctccatttactcaacttgattacgctttaaaagaagaagattatgaaaattaattacattaatacccgcaaaattcccatcttgtttcataatagatagcagtacaaaaacagaataatttaaacgtaagaatttaggaacagaaatcaattaattcttacctacattgtttattttggattctgattgattaccgtccaaccaatatcaataaagtggtaaactgcaaatgaatgaaactcaactttctctacatactcaattaacacaaatgattagcggttattgggtagctcaagctatctccactgctgctaaattaggcattgctgatattttgcaacaaggtaaacaatcctgtcaagaattagctgaaagtacagatagtgatcctagtgctttatatcgtctcatgaggactttagcaagtatcggtatttttcaagaaacagataatcaaaactttatcctcactcctttagctaaacatttatgtagtgatcatccgcaatcagtcaaagcaactgctattatgctaggagatgcaccccattatcaaccttgggggaaaatgttttatagtgtgaaaaccggaaaaccagcatttgatcatcattttgggatgggtgtatttgaatattttaaatcccatcctcaagatgcggaaatttttgaggaaagcatgaattgtttttctttagttgaggaaaaagctattctcgatgtttatgatttttccccctttaaaaccttggtagatgtaggtggaggatatggagaaatgttaggtaattttttacaacaatatccccatcttcaaggtattctctttgatgaagaatatgtaatttcacattgtcaaccaacattagaaaaacatgatatagttagtcgttgtcaaactgttagcggtagtttttttgaagcagttccatcaggaggagatgcttaccttttaaaacatattgttcacgactgggatgatgaaagagcaattaaaattctgcaaaattgtcgaaatgctatggatgagcatagtaaaatattggttttagaaatgattattgaacctggtaatattccgggtgctgcaaaaatgttagatttgaatatgttggtgatgtgtcctggtggtaaagaaagaacagcagcagagtttcacgaattatttacgaaagctggtttaaaattaactcagattattcgcactgctgatgatatttgtatcattgaaggttgtaaataaactctcagtttttttttatgatagcatcccaatgaaagaaaaaaagtaagcatttattaggtaggacaagttttggaatatgcagttaaagcaggtttaccgttaaattgtcaaaatgtcagaattcaggagtcagtaggggcaaaccccccgtggttgcccgtacttgaattttgtattttaaattctcaattatgacaaaatatctcactattaattaattaattaattattcaatttttaacaattttcatgtatttacaccacatctgcaaaaacatattttttccttagcgtctttgctgctttgtgtctaccctgcgggatctcctgacggagattgcgcgaaaccttaatcaagatttggttcattctaatttttccctcttccgtacaccttctgtattctttcttctgccgcttgctttgttgtgcctcctgcgtttttgcggactttttctgtgttcttttacagaaaatccgtgggctataaatgttgtgtttctaccttgtaaatcagttgtagaaacatatctgtcatctaaatcagaaacaggttgataattaccccatcctagaaattcatattgctgttgtcgtgcttcttcccaagaattggcttcaaatttttttatcaattgagaattatcatctagcaaaacacgggcgctttcattatgtgatggaaagaaatcatagctaccatcttcattttgccataattcataagttgttaattttaaagaacttgtcatatacattagacatctccagaaaagaaattatggaacttatttatgggggcagggtgaagcatttgggatatctatatctctgatttttccgttaaattatcgcccaaatgcttcgcccctacaacatattacaaattaatacattctattgtggagatgtctattgcttctgtctttgttagtggagtttcctgcgcccaaggacatgacttttctagtccacccccttgcgcctgtattctacccctatgagcaggttttttctttcccattctctctaaattttacagtcagaatcaatatatctgaatatctagatagggtttgctgaataaacctaaaaccttgatatatcaaaggttagaggctgataaacacagaaattagtgcaagggttttgaagggtataccggaaaaagtgtgcattttttgggatttcaagagatggcaaagaaattttcaaatctcctcctgactcctgactcctatgccctcatagaaagactttctcagcaacccctagatatttatttgagttaatcctcatctcatcctttagcacaactcccgacaacgctaaaatagtaccctaaagcaaaatcatcaacatgataatatgaccacagctacaccagtaaaaacagaatacgaagcaattattggtttagaaacccattgtcaactttctacaaacaccaaaatcttctctagcagttccaccgcttttggtgcagatcctaataccaatattgacccggtgtgtatgggtttaccaggagttttacctgtacttaatgccaaagttctagaatatgcagttaaagcaggtttagcgttaaattgtcaaatcgctaaatatagtaaatttgaccgtaaacagtatttttatcctgatttaccgaaaaattatcaaatttctcaatatgacttacccatagctgaacatggttggttagaaatagaaatggtagacgaagcgggaaaccccacccgtaaacgcatcggtattactcgtctgcacatggaagaagatgcaggaaaacttgtacacgcaggaagcgatcgcctagcaggttctagttattctctggtagactataaccgcgctggtgtccctttggtggaaattgtttctgaaccagacctgagaacaggccaagaagctgcggaatatgcccaagaactacgccggattatgcgttatcttggtgtcagtgatggcaatatgcaagaaggatctttgcgttgtgatgtgaatatttccgtccgtcctgtaggacaagaaaagtttggtacgaaggtggaaattaaaaatatgaactcctttagtgccattcaaaaagcgatagattatgaaattgagcgtcaaatagccgctattgaagcaggggaaagaataattcaagaaacccgactttgggaagaaggttcacaacgtactagcagtatgcgcgttaaggaaggttctagcgattatcgttattttcctgaacctgatttagcacctattgaagtttctgatgcacaattagaaacttggaaaagcgaattaccagaattacccgcacaaaaacgccatcgttatgaaaatgagttaggactttctgcctatgatacgcgagttttaacagaagatagttctgtagctggatattttgaaagtgctataaacgctggtgcaaatcccaaagctgctgcaaactggatcacccaagatatcgctgcttacttaaataaacaaaaactcaccatttccgaaattaagctgaaacctgaaagtctggcagatgtaattaccagaatagagaatggtaagattagcaacgctcaagccaaggaaaaattagtagatttactgaatggactagaaccagaaaaagcctttgtaggtcaagaattgattagtgatccggctgttttaggagaaattatagatgaaatcattgcggcaaatccgcaacaagtagaacaataccggggaggaaagaccaaccttaaaggtttctttgtgggacaagtgctgaaaaagaccaacaaacgcgctgaacccaaactaactaacgagttagtcgaaaagaaactgaacggaaattagtagtagtcaggagtcaggagtcaggagtcaggagtcaggagtcaggagtcaggagtcaggagtcaggagtcaggagatcaaggagtcaggagtcaggagtcaggagtcaggagtcaggagtcaggagtcaggagtcaggataataagaataaatttcttccctgttccc

SEQ ID NO: 80 - DNA, 22602 bp, Sphaerospermopsis sp. LEGE 00249
  LEGE00249_98
tgataatttatcgcccgaatgcttcgcccttacaggaaaataacctgtgataaaaattgataatttatcgcccgaatgcttcgcccttacaggaaaataacctgtgataaaaattgataatttatcgtccgaatgcttcgcccttacaggaaaataacctgtgataaaaattgataatttatcgcccgaatgctgatgcttccagcacgcttcgcgaacgcccttacaggagtcaggagtaaaacccttttttaatcagagttttatgattaattgatgtcctaactactctgtgtacggctataatttaactgtggagaaaaattgaaaaacctagtttttaaaaacttttaaaggctaggaataatatccccgacttttaaaaagttggggttttgagttataaagcatcaaaataaatcataaactaggagtgtgatctgtgtctttacaacaagttgaaagtttttatgaaatgttgaatttagaacccggtgtttatgatctgtattataaaaattgccgtcaacccggattttttgataattctcactgggatacaaaaaaaatagttaatttcgctgctacttttggctatatttttaccgaagaagaattacaggacttttggtttgcaaatgaacctgtaacagtaagtcgtcaataggtgattggtgattgggaaaatacaaataatttcctctgcttcccagtttcttccccagtccctagtcaccagttcccaacaaccaaaattccaaaatagcttttgcctgtagacattactgttattgacttaaaatcagcacttgtcgcattttacgcatattgtctggtaattccaagttcattgcttgttgaataaaaattgaggggatgggaatattcggtgttgcttgcactgtataggctaacaaagttccatttcccatgtctttaagttctaagttggcatggaaatcttcaaatgtccctttttccatgcgaaattgtatttgctgtcctaagacttcaacaacgctgagataaatttctacttgggcagtgaaaaataaaaaggctttctgtgctgtttgatataggcgcttgacatcacccttggttatgatctcgctttttgtgacatcagggaaatattgcacccaacggggataatctgtaatctgctgccaaacgttagaccgaactaagggtacgtacatccaagctgtgacagcaccaccccagagagtatgcgatcgcgtttgtagcaaaatttcaccttggatcagtgacttttgtttgtctggactccacaacatatctaaccctttagaaccttgaatagttgatgagatatcagatacagacatagtgtttttctctacccctcaaacaatatttattaaccaaaaactgaatcaaacatttaaatcttctaaaaaaccagagtttgaaagtttcaaccaagaaatttcaggatttaaacctactcatttttaattacagttcattttattgattttctggatataatttgatggaagttgattctatctaaaaactcttgcaccctgtatttaaatctacctgtttggcagaaatgacttacagtatcattttttctctctttcccattctctatttcctacccaaagagcaagtcctaagttgacaatttcatagacaaaactatacttgtattgacaaaaatcaatatatttttaggaaaaaatcaactacttgatatataatacggtgatatcaagtattgaattgagactattgccgacgcgaaaaccaagcaatgatggtggtagtctttttcagaaacttaattggaacacaatcgcgtctggctaaggcgtgaaagtctactgagggataactgctcccatgctcccgttgaagtagaaagtaaagtctagttttgtctaggttttatatagcagatatgaacctgcaacaagcaaacgtgatataattttaattgaaaatgtaacttttgctgaaattgccagaaaaatccagtgaatcaatcttcattaaatcgcaaattaactcaaatcttgggtatccttcttggtatgggaatagccttatggatactcagaggcttgggtattctcacttttattcctggtggtgtgatttggttattgttgtttggggcgttggggttaggcattttcagttattttcaacgcagattatggcgtttttaagatccgtcctcagcaataagcaagtaaatatagattgataagctgttacacagctaaattgtataatcctaatattctgaactcttgtttaacaggcaagatgcctgttccacttatacaaattaaatgcacaacagcttatcaaaatataaatatagtgataaatatagtgataaatatagtgataaatatagtgatccgatttgattcatgaatttttcgtggatgtggggaacagggaacacttcgacaagctcagtgcatcgcagggaacagggaacaggaaagaaggcagtatgtacggagttctgttcaaaaatcaaataggagtcctatatatggaatactatggaatagtggaaagctgaaataattagttattagggcgcacaaccatgaaaaaatatatatgtacggtctgcggctatatctatgatcctgaagttggtgatcctgatggtgggatagaaccaggaacagtttttgaagatatcccagaagactgggtttgtcctgtttgcggtgctgcaaaagaggattttacactttttgaagagtaaagtaagattattgaaagatttttaaagttgtcacccttgcaaattgtagttattggtggtggggcggcgggtttttttggtgcgatcgcctgtgctgaagctaacccccaagcccaagttactgtcattgaagccagtcgtaaaccactggcaaaagttctcatttctggtgggggacgctgtaacgttactcatgcttgttttactcctgaagagttggtgcaaaattaccctagaggtggtaaagctttgcggggtgcttttactcgtttccaacctcttgacaccgtagcttggtttgcggctcatggtgtaaatttgaaaactgaagctgatgggcggatgtttcccattacagatcgttcggaaactattgtagaatgtttgattaaagctgcttttaatgctgggctagaactgagtattggtactcctgtaatttctgtgaaccgaaaaaacgagggttttgaagttattttcaagtcgggagaaacgaaatattgcgatcgcctaattttagctactggtagcagtttaataggttataaaatcgctagagagttaggtcatcacatcgaaacccctgttccctctttatttacttttaacattgctgatccaaaattacgaacattggcaggaattagcgttaatcctgttaatctgcgtttatcaattgcagataaaaaacctttacaacaaacaggacctttgttaatcactcattggggtatcagtggacctgcggtactgaaactttccgcttggggtgcaagaatactgcatgaaaatcgctatcaatgcaaattatacattaattggttgcccaacttgccacaagaggaagtgagacaaaggcttttagcggtaaaacaggaatggggcaaaaaagcgatcgccctccatcgtggtgttgacttaccccatcgattgtggcaatatctaattagccgtataggtattactactgaagaccgttgggcagaaatatctaacaaaaccttaaatcagttagttcaagaaatatctcagggagaatacttaattaatggtaaaggagttttcaaagaagaatttgtcacctgtgggggtgtcaacatcaaagaggttaattttaaaacaatggaaagtaaactagttccgggtttatactttgctggggaaatattggatattgatggtataactggtggttttaacttccaaagtgcttggacaaccgcatatttagctggaaagtcaatgactcaaacgagtaattcctaactgtcaccaaaaaagatcagattaaggcatgatcattgtcagaaacctcagatgctcaaaattaaatcatgttattcagcgaaattgttagtaaattaagtgacaatattcaagctcacagtctcaccctgaacccagaactcaacccagaaattaccggagttgcagctatagatgaagctacaagcggttctatcacctatgtggaagggggaaaatttgcagctttagttaattctactgttgccagtgctttaattttacctctggatgaaaaattacacactcaagctacagaaaggggtattgcttggttagcaactcccgaaccccggttattatttgctcaagcgatcgctcttttttaccaaccctatcaacctaccccagaaattcatcccagtgccgttattgactccaccgccaaaatcggtaataatgtttatcttggcgctcatgttgtcatttctccaggtgcagaaattggtaatagtgtaattattcaccccaacgtcgtgatttatcctgatgtaaaaattggcgatcgcaccaccttacacgctaactgtaccatccatgaacgtacccaaatcggtgcagactgcgtaattcatagcggtgctgtcatcggtgcagaaggttttggttttgttcctacccgcacaggttggttaaaaatggaacaatctggttatacagttttagaagatggggtagaaataggttgtaacagtgcagttgatcgtcccgcagtcggtgaaacccgcattggcaaaaatactaaaattgacaacttagtacaaatcggtcacggttgccaaattggatcaggttgtgctattgctggacaagcaggaatggctggaggtgtaaaagtaggaaaccgagtcattttagccggacaaagcggaatagcaaatcaagtaataattggagatggggcgatcgcctctgctcaaacaggtattcataacaatgttgcaccaggagaaatcgtctctggtactcctgccgtaccatacaaattatacctgaaagtatctgctatttatagccgtctcccagagatatatcaaactttcaaacaattgcaacgtcaactagggaaaaagtcagattaatttttttgtggaacaggcatcttgcctgttttgaattgataatattttactattttggataattctagctattaagccaatcttcaccccctggtaattgagcaaaataatcatctatcacatcaggtaattccctatttgtatagttatatgtcattcctaataactcagttacatttaatattaattgggatttatttaacatttgggaaatttgttttcgttttaaagtaccatgtaaaacctctaaactagcatctgctattgctggtgtaagttcatcttctaaataagtttgccattcatcttcattgatataatgagattttttattatctttcaaattcacctcttgaatttccaagatagcattacgaatagaagcagtccaagaattggttaatctctgttctatttgattcttaattaaatgtatgagcagaatctttaaaaaggatttaatctgccgcaaaatagcctttttactcattccctctaattcatcaacaattgccagagcatctgtgtaacgtcctgccaaaatgctatttctgaggtcaattaattcctgtgtcatctgtattcacctcaaactataaataagagaatattgattcagacaatccttaattgtattttatagttaaatttgttcatttgtctaacttgaatcagccggttttgatatattctggagatgacaccatcaaaagcggagagaaccagaattgtgaagttacataaaccaatattagtgggaggactgggtttgtccttttccctgtggatgttagacacctggcatgattcaatagtacaggtaggagagtttgggctgttgagtgctttagcagttggtgggggtttgtggttgttgcagaaaaatcgccctcagattggtgaacagctagataatatggttatagataggtcatctgtagaaaatgcagtcaataaaacccaagctatcatcaaccaactcgcacaagaagcagtcaaccatcccagcttaacaactttacgtgaacaactggaacaattacttttagagttggatagacgagaaattcaaattgctgtgacaggtggtaagtctgtaggtaaaagtacaattattcaaactctcaaaaatgtagaaactttatctacaaactctctacattttgtagaaacagcacctttatttacaggaatgaatgaaacttctgatgcagtcacattatcagaactgcaaaaatctgattttgttttatttcttaccaatggagatttaacagattcagaatttcaagtttggcaacaattaaaagctgtaaaacaatcagtattgctggtttttaataaacaagaccagtatatagtagatgaacgcgctacaattttgcaatccttgaaacaaagagtttctggtaatgtagttgcaacttccgcttcacccttacctgtaaaagtgagaaaacatgaagctgatggttctgtacaagaatggatggaaaaaccaacaccaaacattcaagaattaacagaaaaattagttgaagttttaacacaacaaaaacagcagctagtttgtacgacaacaatgcggaaagtgctgttactcaaagcggaagcgaaaaattgtttaaatagcatcagacgcgatcgctcaacacccatcatagaacaaaatcagtggatagctgctgctgctgcttttgccaacccaattcccgctttggatatattagcaactgcggctattaatgcacaaatggtaatggatttaggtaatatttatcaacaaaaaatttccttagaacaggcgcaacaagtagcggtcactatgggaagcttaatgttgaaattaggattagtagaattatctactagagcagtaacaggtattctcaaaactaatgctgtcaccttcgttgcagggggagtagttgaaggtgtgagtgctgcttatttaaccaaagttgctggtttaagtttggttgaatattttgaacagcaagaaatagcattagaaacaggaactggtttaaacctggaaaaattacgccaagttttgcaaaatgtattccagcaaaatcaaaaaattgctgttttggaagcatttgttaaacaaggtgtgaaacggttattaccagaaacaaaaccagttgaagtattgggataattttgtacacagaaattacaaacccgcttgcagtggagttattcccaaataaaaagcgggttttattgtcagaatttagcagtcagaagtcagaagtcagaagtcaaaatattttttaatcactcaaatttaatgcgattttgaacagatttattttgtggtagggtttatgataatgtctgtgattttctcagatgttgaaactattggtaaatttatgacacctcaagaatttttggataatttagctacagcaaaaacagactcagaaaaacttgttgtttttgcaagatacctggacacaacagcattagatcatgcaaccacccccagatggaaaagtttagcttacagtatggaaattcaatttgcactcaataaccttgcttttcatttagaagcattagctgaaaaagcaaattaatgattgaaaataatacttaataggtatgattttttgtacctatcaagtaattatattttttggttaaactctcctaaatacctgatttatcaattcacaaattacttaaattacttaaatctgacgataaacagcaaataaataatcattatatttgtgttcaacttcaagattagtaaacgcccaagcgattggataaggttgttgatattctcctaaaatattgatcctgtgacaaacaccaggaattttggttaaatatttgttgtttaaaggtgaatcacaaacaaataaacctctagctgtgtatgttgtacctatcatatttaagctatgattaattatgattgctacatagtatttatcatcagcagaatgcagcacttgaactaagtcattatgagtaataccaagtaaacgagtaggtaatttaaaatctgcgctggtgtctaaggggaggttttgagtctttacccaagtgataatttcttgatgttttttcaatgctgcacgtttttggaaaaaatatttgatctggctaaataaattagcgatcgggtatatcagttgtagtgcgattaatatcaaggtcatgaatattctttggagtttaaacattttttacacctgtttgttataattgagattataaaacattttaattaatctctagttgtaacatactatgcagcctaaacatccttggttacaaaaatgtatacaaaagctggaagaactacctcagatagagacaacaacaactatagaaccttttttagaaaacactctagcggatgggttgttaacaatatatacgcctcataaccaagttaaatatttagttgaaattaaagcatccatcactttagatacagttgatgcaaatattaattatatcaatcatctgaagcaaaaactgagcagtgataagagaacattgctaattacagacacactttgtgatgctgttgtagagtcattactagaaaacaatatagaatttattgacacgacaggtaatatttaccttaacaattcgtccttatatattttggttcatcagtacatagtatgctaaactaatatttaaacttccaagtaagcaaacatcttaatcggaaattatggttcttcggtacttgttatgctaaattactaattgggtaagagggaacagggaactcttaacaacatcatttgattttaccaatgaatggcaatatttgtatcttctctttcttctccggttcaggtttcctcgatttaggttttgaaaatacaggttataaaatcgcttacgttaacgaaatattcccccctttcatgtctgcttatcgctattcacgggaaatgttaaaactcccacaacctgaatatggatatcatgaaggtgaggaagcagatgtcagtaaattaactcaaggaaatgcagcacaaaaattaaatgaattagtcaaagattcccgtaaatcaaataatataattggctttattggtggtccaccttgtcctgatttttctattggtggtaaaaacaaaggacatttgggggataatggtaaattatcggaatcttatattgagttgatttgtcaaaatttacctgatttctttttattcgagaatgttaagggtttatggagaactaaaaaacatcgtttgttttatgaatctttgaaaattaaattacagcaagcaggttatattttaacagaacgtttaattaatgccattgaatatggtgtagctcaagatagagacagaattattttaataggctttaagaataattttctcaatgatatgggaattgatgattttacctttccttgggaagaatatattttatatcctcaaaatcaagtgtttgcatattcttggaataaaaccgaaccttttaaagaaaattctatcacctattgtcctgataatattcctcaagaattaactgttgaatattggtttataaaaaataatgtgcttaatcatcctaattcaaaacattattttcacccacgagcaggtatcactaaatttttaactattgatgagggagatgattctaaaaaatcatttaaacgtttgcaccgatggcgttattctcctacagcttgttatggaaataatgaagtacatttacatccttacaaagtgcgacgtatttctgtatctgaagctttagctattcaatctttacccgctaatttttcacttccagaaaatatatcacttacgaatatgtttaaaaccgtgggtaatggtgttccgtacttagcagggaaagcattagctcaaagtatacttgattttttgtatattaaaaagttttctgactcctgactcctccaaatatgatttaatagagaagaaacatcttaaattttcataaagattaataatccctaactggcagacttaacaatggcagcagactcccccaacattgatattgcgccatttatcgatcactccctgctattaccaactactaccccagagcaggttgagagatggtgtgaagaagcatatagatttaattttgcagcggtttgtatccatccctgttatgtcaaacacgctgcccaactgctgcacaacaaaaacccccaagtttgtactgtgattggttttcccactggtttgactacttcagccgtgaagttatatgaagcgcaagaagctgtggaaaatggtgcaacagagttagatttggtgattaacttaggttggttgaaagcaggtaaaagcgaggaagtacaccaggaaattgctacaatttgtgaagaaactggaaaacctgtaaaggtaattttagaaaccagtttactcacggatgcagaaaaaaaacttgcagccgaactagctatggatgcgggtgctgcattcttaaaaaccagtacaggttggaatggaggagcaactgtagcagatgtacgcctattaaaagaaatagcacgggatagggtggcaattaaagcatcaggagggattcgcacccataacgacgctttagatttaattatggctggtgctaccagattaggaacatctcgcggtatagacttactgcgtcaacgcgatcgccaagaagaggtgactggtgactggtgactggtgactggtgactggggactggggactggggactggtgactggtgactgggtaaaaataactaatgactggtgactaatgagtagaacttatcaagcaactggtattaatctgaaaacccaggcattaggagagtcagataaaatagtgacaattttaaccaaagaatttggtttgattcgggcgatcgctcctggttcacggaaacataactccagtctgggtgggagaagtggaatgtttgtagttaatcaactgctcatttctcaagggcgattatcacaaccagctacatcaactctcaagagaattacccaagccgaaactataaaaacctacccaggtctaaccaaagacttgggaaaattagctgctagtcaatatttagcggaaatagttctgtgtcaagctttaagcgaacatccccaagaagaactttatgaggtatttaacgaacatctccagcgtttagaagctttaccaaaaaatcaaggacaagatgtagtagcatatttagcgcatggaatatttcacctcctagctttagcaggattaaccccacaagtgcaattttgttgcttaacccagcgtcccctaactccagacctgaccaaccctaactggcaggcaggttttagcattgctgcggggggaacagtttgcttacaagcgtgggaacagttaagaaaacaaagggaacggcaaaaacaggaagaaagaaaacaggaagcagaaatttctccatcggccaataattcccccaaagcgggttatcaaacccttttccatcaccaagacctaccaaaaatttcccgtcgtttgggtgcaaaagaattagaaatgctccaacatttgtcccaaccagggataatgcaaatagatgcagccgcagatgatggctggttatctgttgagcaaattttgcgccagtacacccagtaccatctgggtcgccctattcgctctgccacattgatagattcttattttgccgctaaccatgatgcaatcgtctgatttggatcgaaaaattcagcctttatcacctagccaagctaacaacaagaatagggtatcagaatctacacaacttaatcatttaagttctgtttcacccctaaagtctggcaaaattcatagtccagaaatgtctctcaaagaagttgctgatgagaaaaatttgacatcagaacttgatgtgaatatacctcaaccatcagatatagattcaccaatttcaggaacaagtaattgtgaaaatggtaaggttaatagtaaggttaatagtaaggttaatactacggaaaaaagtttacaattaacatcacccttagaaacagaaacattaccattaaacggttctggttcaggtggaaattcaacatcaagtgatgtggaagaaaagggattttttcctgtcttaaaaaacccaaatttcctagcactgtggggaggacaagttttctgtcaactggctgataaagtatatctagtattgatgattgctttgattaacagtgagtttcaacaaggtggtcaaagtatcagtgcttgggtgtcagcgttaatgatgatctttaccattcccgcagttttgtttggttcagtggctggtgtgtttgtggatcgctggtcaaaaaaagctgtattggtagcatcaaatatttggcgcggtatcctcgttttagcaattccttttttactgtggttaacccatgattggcagcctgtgggagttttgccagtgggttttttaatgatcttactggtgacttttttggtttccacattaacacagttttttgcaccagcagaacaagcagccattcctttagtggtggaagaaaaacatttactttctgctaattccctgtacacaacaacgatgatggcatcggtaattgttggttttgctgtgggcgaaccagtgttagttttagctgatagtatttgggcaaaatttggcggtagtgggggactcggtaaagaaattttagttggtggtagttatgcgatcgctggcatgattttattcctcctcaaaaccaacgaaaaaccgcacccgccagaaacagaatttcctcacgtttttgaagacctgcgggacggtttacgttacctcaaagaaaatcaccgcgtccgcaatgctcttttacaattaattatcttattttctgtgtttgcagctttaaccgttctcgccgttcgcatggcagaaattatccctaatttaaaagcttcccaattcggttttttacttgcagcgggtggtgttggtattgcaggaggcgcgacaattctcggccaatttggtcaacgtttttcctatcgacaacttagcctctggggttgtctgggtatggctgcatctttagttggtctttcactcttcacaacccagctatcgctagtgctgcttttcataactttattaggcgtgtttggcgctttggttggtattcccatgcaaaccgctatccaaaccgaaacacccccagaaatgcgtggtaaagtgtttggactgcaaaataatgtggttaatattgccctgactctacctttagctttagcaggtgtagcggaaactttcattggcttaaaatcagtctttttgtccttggctgtgttcgtctttctcggaggtatcttcacctggtataattcccgtacctagttatcagttagtcaatcatcaaaaagttaataaaatcactggttttcgtgctaaacttaatccagcgaaaattcagaacatacttgctgaggattaatgaaacctgatcctaattgattggcgatcaagttgattaattcccaacttaaaaacaccacaaataaagccataaatttgctatttgacttggctgatagctgagatatttaataaagatatggcattaatttattgatgcacaaaaagcagcaagtatcacgggataaaaacagctaagtataaaaccccaatcatttcaaaccgattttatcaacagctaattaaagaatgcgtatagcctggattggaaaaaaatcacccttttgcggtaatgtcacctatagtcgggaaattacaaatggattattagataggggacatgatgtaagttttcttcactttgctcaagacgactctgaaccagataactggccaaattttaaagaagttcccctaccttttatttataagtcccaagtttacacacttcccgcttttaatgccactaaggttttaaaagacgcattgcgggaaatacaaccacaaatagtccatgcttccttgactttatccactctggactttgttttaccagaaatttgcaaagaattaaatttacccctgattgctacttttcacactccctttgctggtaaaggagcaaaattaatttctggtacgcaacttttagcttatcagctatacgcaccttttttagataattatgataaggtgatcgtattttcccaaattcaacgagaattattagcaaaaatgggagttagggaagaaaaaatcgccgttattcctaatggtgttgatactgttaaatattctcctggtgattctcctggtgtttcccatgtcaaacaagaatttaatgctgaacgtttgtttgtttaccaaggccgtattgcaccggaaaaaaatgtagaatccctattacgagcttggaaacagtcagatatggctgctggtagtaagcttttaatagtgggtgatggtccattgagagcatctttagaaccattttatggctcagaatatggcattatctggttaggttttgtcgctaatgaagaacgccgtatagaaattttacggggggcagatgtatttattttaccttctttggtagagggtttatccctgtctttgttagaagcaatgtcctgtagtttggcttgtttagctactgatgtcggtgcagatggggaagtattggaaaaaggtgctggggtagtaattaactctaaaactgtgcgatcgcaactcaaaacccttttaccactattccaagatcatccagagttaacaaccatgttggggcaaaaagcaagaaaacgagttttagaacgctataccctgagcgataatatcagttccttagcagaactttatacacaagttttagcaaagcgtcctgtaacattaggttggggtgtttaagtgatcaatgggtaattgataattgacaattgataagtgtttcattcagggcttaaaacctcccccttcaaggggaaaaagccaaaaatgctaatttttcaattctcatacaatcataaaaaagtcgggaatctgactttttatctattatttggacgctgaataatagtttccatcacccgacgttttgctttgggatcaacacctaccaaccgcacatactcaccactatattcagctaaacaagattctaaagttgaaatcgcatcagattcaccatctatctgtaaagtaccacaactttgccacgaaccagtgcgaaaacgtctttcatcaacatgttctacaccaattttataaccttgggataaaatttgcctgacttgttcctgtgtctctaaacttaaatgactttgatttgtaatgctattgtttccatttccattagttacaggttgactaacaggagtttctttaacaacagcttgagatttataaagtctaccccgatttaaacgattatattcatcaactaaatgggaagtttccacccgtttttgttcacctaccattaaattaccagattcaattaaatgggataaactaaaatcaggtttcttaaattctggtggtggttctacactattaaccactcgcattgagattttttcataacctatttgatgaataaaatcacgaatttgttcatcataaatacgagaacgcaaagcactaaaaaagtcaatagactgatgagagaaagtatctactaactgttcaatttctccttgtgaaagtccatcttccgcaaaaattccccccacaactcctaccttatcatcacggttgggttcccagtaaaacttctccattcttccatctctaattaatggtgcatagagagtagaaaaatcatttcctgtcacaataatgggaacacgacgaatagggttagcatcataacttcctggtaattgtacatcagtgggattatctgcaatattcattaatgttgcatttaccaactgagtattaactgtgtattgagtaccttcgtcaaagcgtcctgcacctgcatctaaatcattaatcattaagacgcacattttaccccgcaccttaactaattctgcggtttctcgataacgcaaacgaattaaccgtgctggatctcctgcatctggactttctaattctcctccagaaatgagggtgacacctatacccattttttcaaatgctaattcacattgaaaagatttaccttcacctttttttccatgaatccctaaaattaagggaactcgtacaccgggaatatttaaaaagtttttggtgatatgaacagcaattttatccagaaaccgaggagaaatgtagtaactcataattttattataattattataattattataattattataaaagttattatcaaagttttgacttttgactgaaaaccaaaattaaaatctacaaactatttgggggatttttcccccagtaattgtaccttattaaaccaatgatctatcagttaaaatctcataaccatcttctttcactaacacagtatgttcaaactgagcagataaagcattatcaacagttacagcagtccatctatcagccaaaattctggtattttttgaacctgcatttaaaattggttcaatagctaaagtcataccagcacgtaatttcacattgggaatctcacgagttctatagttgaaaaccgcaggttcttcatgtaaatttctacccactccgtgacctgtaaattgttccaccacactaaatttattcatttttacatggtcttcaatcgcaccagcaatatccgcaaggtgagcgccggctttaacttgttcaattcctttatataaagcttcttccgctatttttattaatctagctgcttctggggtgacatttcccacggcaattgttatacaagaatcaccatgaaatccctggtaataagcacctgtgtcaacttttaatacatcaccggagcgaataacctttttcggactaggaataccatgtacaacttcattattaatactagaacaaatcgaagccggaaaaccgtgatatcctttaaagctaggagttgcacccatttcgcggatacgtttttctgcatgagcatctaagtcagcagttgtcattcccggttctactaactcagaaatttctttgagaacagtggctacaatcttagccgattgtcgcatgatttcgatttcgcgcggagatttaatttctatacccctgcgttgtctgggtgctgtgggtttggtttgaactgtttcagaaattaggttgctgagaatgttcatcatgtaatttagtaatttccgtgactttacggcttagatttcaggttgttgagatttattgcaaaaaatatctatctttacgttagcttattttgcgttatttagaaaattggtaacgggtaattggtaattttccatcccatgttttataagtttttttaatctgaattttgccaaatttgttcaacttactatttttcgcaataaatcacctttattctcaatattattgagaacattatcaataattttacgagtttaggttttttcagcgatttatatttacttatgcgtaagtcccagaacagttgatcaacgccctaggctccctgggtatcggaaagtggcacaattgtattcgggtggaataaaaaacaggctctcctagagtggttatggtaatttaataaaaaataacggctaaaactattatcatacaaggattccactaatccaaaacaatagatttaataaaaattgattttgattttattgaatctcttgatacataatgaacttaaccaagtattaagtgttaaatggtcatatctagtctaggagagccaaaaagttaaagtagcgataaaactaggtctagacctcagtggaatcagtagggtgtctttgatagcaccgttgaaggttcgtttgtggactattcaagaatcccccggcttttagccgtggggagtatcaaagacaaatgtacttagtagaataaaaccacattctgcaccactaactgtcacagatcaaaaaagtagtcccatatcataaaaaactgaaaatactcatcattaattaccaatgttatcattacttaatgacatcaatccctggttagttggaatgggattaaacgctattttattaggcatagtggcgattattcctaaaaaattactcacccctgcgggaatattccacgcttggttattgggtgtaatagtttggggaacactgggttggccaggatatctggtggtagggttttattttatcgtcggttcgggagttacccgcatcggtatgaaagaaaaagaagcccaaggaattgcagaaaaacgttctggtgcaaggggtcccgaaaatgtttggggttcggcgttaattgcgactttatgcgccctgggagtatggcttatacctgattggaagtttttgctgtgtttgggctatgtagcgagctttagcaccaaattatcagatacaactgccagcgaagtgggtaaagcctacggtaagcgtacctttttaattaccacattgcaacctgtagcgagaggtacagaaggggcggtaagtttagaaggaactttagcgggtattatcggatccgtagcgatcgcccttgtaggttggagtgtaaatttaatagatatcttaggaattgtttggtgtgtaatagcagcctttatcgctaccaatttagaaagtgtcattggtgcaacattgcaatcgaaatatacttggcttaccaacgaagttgtcaatatcttcaataccctaattggggcagttgcagcaattatcctcgctgttatttggcaaatgatatttgtttgaaaatttactaaaaattcaaaattttaaacagcaaatttgctgttttgttcatgactattactactccaaaaccataggaaatgtgtaaaaaattgcatttactatttatatggtgtaggtaatttttataattatttattttttcactaactaattcataaaatctttatcatcttgaaccttattttcctacggttttatctattatttcatggaaaagttgtatagatttttaggattttcctcatatttatttcatggaatcttcatcattttttacaatcaacgacgatcaaatcgacctctatcaagtagtcaagtatttacagatttctggtaaactaaatcagtttatcagcgatgttctgcgtcaatatgtcctagagaaagaactaaaaaccagagatgatataaatatcagtacagcattaattgaacaagcaattattgattttcggttaaaaaatcaacttacagatcctgaacaattccaaacatggttacaaaataatggtagtgattatgctacattttatgaatcagttagctttgggttcaaattagaaaaactgaaagcggtaattaccgaaccaaaattaccagaatactttattgaaagaaagatttatttagatcgagtcgtactttctcggatcatggttaataaccgagaactagcagaagaattacacactcaaattgaagaaggaagtagttttgagcaactagcaaaagagtattccttagcagatgaaaaaacctttaacggtatgatgggtcccattagtcggggtagtttaccagatattttgcgtgcgtctgtagatgcagctaaccttggacaattgataggaccgatagaaatagaaggaaatttcagtttatttagattagagaacattctaccagcaactttagaaaatactcaactaaaacaatcactacaaaatgagttatttgaaaaatggctaggggaaaaaattcaaaacctgacagtaaaattacaagtgagctaaatattctgaactatcaaaatttacgaataaatgtgctagatactttaccttggaaaaaaccgccattgtgctggttgactcctgaacaacaaacagaagtaaccaatgaattagaaattcgtcaatatcaacttggcgaaaaaatttggttacaggaaacaggagaatatcagttttttattgtcactggtaaagtccgtttacgggatgaaaaaagtaaacctgtagccaccttaaatgatggcgattggtttggtgatttgcaacagttattcactaattgtaaagctgtagctgctagtaaagaagttgtagttgtgtgttggaactcatcactatgggaaaaattttctcatcctcaaattgatgaattttggcatgggaaaggtggcagggaacaggtgacaggtgacagtgaaaacggggaaaaagaagaaatatctactgcactgacgacatcttatttatctttaccttcatcatcaaaatctgtaatttctgattatccttctaactatccttttgtagtgagtgaaaatactgcggccgcttgtttaacaatggtggcacaatatttaaataatagtgtgcaactagaatgggtacaacgtcaactgcggggacaacgccccaaaaatgtgatagaaacagcggaaaagttagggttagttttgcgaaaattgcaggtaaattggggtgaattacgacatttatcttttccggctttactattatggaaatcggaaacagttagcagttgggttgtaacttatgggatgaaaggtaattgtttaattattgccaatcctctcaataatcaatgtgaatatctcacccaatcagtaatagaatcttgttgggatggtaaattatggcaagtagaattaatttccaaacaagagaaatttaatctttcttggttcactcccgcagtttggaaatatcgcaaattattaggtgaggtattactagcttccttcactttacaattattgggtttagcttcaccattaattacccaagttatcattgataaagtaatggtgcaggagagtttagctactctcgatgtcatggcgatcgccctcttattagtcgccatatttgaagctctcctgggtactcttcgactcttcatttttacccacaccgcacggcgtttagatttgagtttatcagcccaactttttcgccatttaatgcgtttacctttggcttattttgaatctcgcagagtgggtgatacagtcgccagagtacaagaattagaacaaattcgccaatttttaacaagtacagctttaacagtaattctcgatagtatctttgccgtcgtttatttgggattgatgttttattacaacattcccctcacttttgtagctttagctgttctcccattatttgccactttaacaattatcgccaccccaattttaagaaattggctaaacgaaacttttaaccgcagtgcagacagtcaatcatttttagtagagacggttacaggtattcattctgttaaagcccatgcagccgaaccagtagctagagaacgctgggaaggtttatttgctaagtttattagaactggttttaaagcttccactacgtcaaatattagcagtaatattggtgattttctcactaatttttctacattgttaatactttggtttggtgcaagattagtcattgatcagcaactcacagtaggtcaattaatcgcttttcaaatgttatcaggaagagtgacaggacccttactgcggttagtacaattatggcaaaatctccaacaagtgctactttctgtagatagaattggcgatattctcaacgctgccccagaagcagaagcaggaacgggtttagtattaccacccctcaaaggtgaagttaattttgagcaggtgtttttccgttatagtcctaacaccgaacctgtattaaaaggcatttcttttgatatcaaaccaggacaatttgtgggtattgtcgggcgcagtggttcaggtaaaagtaccctttctaaactgttgcaaagactttatcaaattgaatcaggaaggattttaattgatggttttgacctgaaaagttgtgatttagcatctttaagacaacaaattgctgtagttctccaagaagactttttatttaatggttctatcttggaaaacatcagtttaggaaatccagatattaccgcagaacaagttgtagaagctgccagattagcagtagcacacgattttatcagtcaattaccttacggttatgaaactaatgtaggtgaaagaggtacagctttatcaggtggacaaagacaacgcattgcattagcgagaatgtttctttctaccgccccaattttgattttagatgaagcaaccagcgccttagatagtgaaacagaacagcaagtattacaaaatttgcaaaagatttctgctaaccgtaccgtgtttttaattgcccatcgttttgcacctttaaaacgtgcagatttaatattagtcatggaaaaaggtattattgcagaacggggaacacacacaggtttattgcaacaaaagggtttatactggtcactttatcaacgacaacagatgaatatttaagggtaaagtgactggggactggggactgggg

SEQ ID NO: 81 - DNA, 22316 bp, Sphaerospermopsis sp. LEGE 00249
  LEGE00249_99
actgcggttttgaaatagatagggatctaaacgctgcaattaatttatcgcgtctggctaaggcgtgaaagtctactgagggataaccgctgccatgctcccgttgaagtagaaagtaaagtctagttttgtctaggttttatatagcaggttaattagaggttataaataaatggaaatcggtgtacctaaagaaactaaagatcaagaatttcgggtgggtttgagtccttctagtgtgcgggttctcacggaaagcagtcatactgtgtttgtagaaactatggctggtgatggtgctggatttacagatgatgattaccgtagtgcgggagcaaaaattgttgatacagcagaatctgcatggcatcgggagatggttgttaaggtcaaagaacctttaaaaacagagtataagtttttgcgagaagacctgttattatttacttatttacatttagcggctgatcggcaattaacagaaaatttgattgatgctggaacttgtgcgatcgcctatgaaactgtagaacaaccaggagtaaatagactacctttgctcacgcccatgagcattattgcaggacggttagctgtacaatttggggcaagatttctagaacgtcaacaaggtggtagaggtgtacttttaggcggtgtacctggagttaaacctggtaaagtcgtcattttaggcggtggtgttgtgggaacagaagccgctaaaattgctgtaggtatgggtgctggagtacaaattttagatgtcaatgtagaacggctatcttatttagaaactttatttggttctagagtagaattactttatagcaattctgcccacattgaaaccgcagttaaagaagctgatttagtcattggtgcagtgttaataccaggtaaaaaagcacctattttagtatctcgtgaattggtgaaacaaatgcgtcctggttcggtaattgtggatgtggctgttgatcaaggtggatgtgtggaaacattacacgccacatctcacaccaatccagtatatattgatgaaggtgtggtacattatggcgttcctaatatgcccggtgctgtaccttggacttctactcaagctttaaataatagtaccttgccttatgttgtgcagttggctaatttgggtgtgaaagctttagaagttaaccccgctttaggtaaaggtttgaatgtgaaaaatcatcgtttagtacatcctgctgtacaagaggtttttcctgacttgggtaaataggtgacaggtgacagtttgcctgttgctgtttttcttttgtttgcgcgagggggtgggtgtaaaaaatggatgttgtcaaaaaatgcctgtatctcttgataggcttgactttgaggctattcatgttctctagaccctcgcgcaccttacacagactgggtttcagcctcctgctattgcaattcaaattaagtaagtcggcttgaaaaaaccgaggtatgttacaaaaggtaaatcccctgaaagtctcttccctcttgccttttgccttgccataacgataaattttaacgcctacctacttactccctattagggattgaaacttaaaatattgccaacctctgctttcattggctaataaattgcaattcaaattactcctattagggattgaaacaaattattttctctgtctaattccttttgatggttcaaatacaaattgcaattcaaattactccctattagggattgaaaccacctattgcatacatttccttgcccctatttttttaccccccttattttctcaaattattgccacatctcatcttcaaccgtcttgtcacccgttaaggatgctcccattaattctggaaggttctgctttcaataatagcagatgcagagcctctatgatggcattcctagtcggatactgggaaagagagacgagagaacggctaaaggcgaaatataagcaatttttatctatttttttatatttctcttgttaatgaattgagaaaaatttggttacaagagcaaaaattaagagatgatagagttgattgtattaaaggaagataattgtcaccatgaatcaattattagatgaatcactgtctttgcaaattgccgaaagtatcaaaagtaaagcgaaaaaaccttttgataatgcttataaagcagttttagtaactgagggtgcaaagtatgttcaaggttttatagtttttagtggtcatccattcaaacctgttgaacacgcttggattgagttagaaaatgtaattattgatccgacttttcctcatttaaaaagaaaagcagagaacatttggtattttcctgctcaaagtttgacggtgaaaaagctgaaagcaattattgaagaatcagaagaagattatccagaagatgatcctttacccatttatggtgatgcaccttatgaatattatggggatgtaatgttaggtgatcaaaaatatttggatgcttatcaagctgctgaggttaaatgtcgagaaattaatggtttagatgctgaaaaaaattaatattaaataggagtcaggagtcaggagtcaggaggggaggaaaagtttttgaataataactaatgactaataactaatgactttaatacgatttaccatcactaccaaagtattctctgtagctgcaaattttatcaccgcgcacatcaaaggcaactgcaacccgatttttataaggttgtccaaataagttgccttcatcacgaaattcaaaaataactgttttttcgttgcgggtaatattgtctaaagaagttagctttagtcctggtttaaaagcttcagaaacatattcaaaaaattcttttgctcgttctttacctgtatttaaaccttgaaatttacccattggaaaccaaaaggtaaaatcatcggtaagcatatcaagaaaattttgccattcaccggtttctagtccttgtttaaaatgctcaaatgcttgttgagcagtttttaaagtgttttctgatgtattcttcattgatgttgttatcaattatcaattatcaattatcaattatcaattgataaaagaagcgatcgcagttccgttatagttttacttgatagttttactatggttgtgcgatcgccctaattaattgatacctagccaaaggaatcaattcatcaattattatatttctgatcttgtgaatattggatgtagtgttatacccatcaggtgtttcaccccacgttgataatttacagctattttcaggtaaataaaccacattttgatttaggtttcgcgtcaacaatgtaggggcgttcgcgaagcgtgctggaagcatcagcattcggacaattaattatcggtttttacctaagactatcatccgaatgcttcgcccttactgtggtctaaagatatgaaaactttgcgtaggggtaattcatgaattacccctactttcgttccctttcgcgtaagattatctatcttcttctcttcgtgttctacccttcgggaacacctttgttgaaagatttttcgtggttcattatttagcaatgtccaataaaattaaaatactggacattgctattaattttattggaaaaagcccatcaacttgtcgaataaaccacgtaaaaagcgcataaacgaaggtttaggtacttattacactgatgtaattatacctaacctttgtttaatttcttcagctaaatttgctaaagcaacttctatttgttcacctgtttgtaaatctttgagtgatgatttttccgctgctgcttcatcagcaccaatgatcacacaaaatctaattccctgtttatctgcggcttgaaattgtttacccaattgttttttatcaaaattggtaacaacgttaattcctgcttgtcttaattgttgtgatacctttaaataaacaggcattaaatcttcctgcatattcactaccattacctgcgctggtgtgggtggtaatgtattcaaaatccctgcttttaacaagcgactaattaaccgcgttaagccgatagaaatgccaacacccggcattttttcccctaaaaacattcctactaattcttcatatctgccaccagaacaaatactacctaaagcttcatgtccaattaaacttgtttcgtaaacagttcctgtataatagtttaaaccacgagcaatagataaatcaatacagaaacgtttatcagcaactcctaaatctctgactccattaattacggtttctagttcactgactcctaaattaaattcttcggctgatggtaagtttaaacctagatatttgagtttatctaagacatcatcaacgctaccatcaattttgataaactcaatgattttctctgtttgttctaaagaaataccttctttttctaattcttgtttaactttcgcttcgccgattttttctaagttatcaatgatgccaatacaagctttaatttggttttcagcgactcctacagattgaaagaaaccagtgagaatttttcggttgttgatgcgaatgacaaaatcaccgatattaatagcttcaaatatttcggtgataattgctggcatttgggcatcatacaataaactgagtttaccacgagccacaacatcaatatcacattggcgaaactgccgaaaccgtccatcttttgctcgttctccccgaaaaactacatccatttgataacgcgcaaagggaaaagttaattcatttaaatgccgggcaatataagcagcaaaaggaacagtttgatcaaattttaaagctcttgcttctgaacctgtttccccagatttatctttttctgcttggcgatttggtggtaaaattggatcaataccatatattatattatcaccttgattgcccttggcttgcagcacttctaacctttctactgctggggtttcaatgggtgtaaaaccataactttcaaaaactttacgaattatatctaataaatatacttcgagacgcttttcgctgggaagaaattcgggaaaaccgctaggagtggaaaagttgattttgtcgctttttgccatgcttttaccttgttggtgaataagtagttatcatactaaattacagctattttcaggtaaatgaaccacatcgtgattttggtaattggtaattggtaattggtaattggtaattggtaattggtaattgttagatttctttctgtaacctgtaacctgtcacctgtcacctgtcacctatcacctatcacctatcacctatcacctgtcacctattctgaatcatgaaaccaccaaggatctttactggtgttcattttaatcaaaaaggctttttttctgaggaagcgttttaaaccagcaggacccatgcgcgaagctcctaaaccagaaaatttaaaagcatttttttctccttcgtgcattatagctgttaaaccggcatcattaatactaatagctcctacatctaattgcattccaatttctaatgctaattctgctgattctgcaaatatagcagcactcaatccataaatagaatcattggctaaatctatggcttcttctatactagaaaaaggcattattggcataattggaccaaaggtttcttcgttcatgattttcataaaatggtgaacgttggtgattactgtgggacgacaccaccaaccaccacctatttcttctactttaccaccacagtgaattattgctcctttgtcaacggcatcttttaaatgttcgttaataattgctgcttgtttttcagaaatgattggtcctatttctccgctttcaattgtaggataagctagttgcaaacgatgggcttttgtgactaataaatgataaaattcttcatatatagattcagctacataaattctttcaattgataaacatgattgtcctgtgttgacgacagaaccccagacaattgcggaagttgctaaatctaaatctgctgattctaagacaattgcgggatcttttccacctaattctaagtatgcgggaatgaagtttctagcggcagtttctgctactactcttcctgtttctacactacctgtaaaacaaattaaatctacttcttctattaaagccgctcctgtttgtcctgcaccttcgacaaaatttaaggcatctcttaaatggggaattgtgtttaatgttttcgttaaaggtgcaacaaaccggggtgtaatttcactcggttttactatcaccgcacaaccagctaataaggcgggaattgtatcaattgtagataataaaaggggaaaattccaagggctaattacaccaactagggggtaaggaacagcagtttgatgtaaagcaataaagggaatagatgtatttttggcggtttcttgtaatagctggggggctaaattacaccatctatcaatgctatttaaaaaagagtctatttctaatattgatgttgctaatctacctgtatcattgaccaaggtatctgttaataatttgcgttctgttaatatcgcttgtttccattgttttaatgcgtcaattctaccttctataccgatttcttgccaagcattttgtcccctacggagtcgatgacattgctgagaaagcaatttcgggggtgggggaatgatgacataatcaaatttacctgtgcgggggttgcggacttctatgggttttgtcattggcaggaacagggactagggattagagaattatttattcttcaaattatgcctaaattggtgagacgttcaatagtttgtttttgtgtttgaatgcaatgttttcgatctatattaccatccagcatggtgttaggggggtaaaaatgtgaattgatgtaactttgggcgtaacgttccaagcattgacgggaaagtaaattatttaatggaaattattgttattggtcatatcttggtaatgagtaattggtcagtaggttagaaagtggatatatccccgacttcttgaagaaatcgggtatctgtttttaggttatcataatatgagattttatagtagatattgacaaccattatttcataaacaaatatgaacttaaatttacctatccttaaccaaatcgctaactgcaaaaacttactcattggggggatgggaggaggttttgatattttctgtggtttaccgatttactttgatttgcgaagtttgggaataaaagctcatcttgctaatctgagtttttctaacattcagtaaatgctcaaaattatgcaaaaacgaccacgaagaattgcagagaaaattcctttaccttaaattattataactgacgaaaaatatctattaaaccgtgaaattaaggtattattaaagatgttcactgtatgattttagtgatgtctacttctcaaaaattgcgggaattactcgcaggttcggaaattattgttattcccggtgtctatgactgtctgagtgcgaagttagtagagaaaacgggttttccagttgctgctactagcggttttggtattgctgcttctaccttgggtttacctgattatggttttctcactgctacggaaatgttctatagtgtgggaagaatagctcaatcaattaatataccattaattgctgattgtgatactggttatggtaatgctttaaacgtgatgcggacggtaaaagatgcggtacaaattggtttagcgggcataattttggaggatcaagaatggcctaaaaaatgtggtcattttgaaggtaagcgagttatttctatgcaggaacacgcgggaaaaattcgtgctgctgtagatgctcgtggtgatagtgatttggtaattatagcccgaactgatgcacgcgcaccgttgggtttagaagcagctattgaacggggaaaatcttatattaatgcgggtgcagatgttttgtttatcgaagctccccaatctgtgagagaattagaaattattgctgattcttttcctgatattcctttagttgctaatattgtggaaggtggaaaaacaccggaaattacaaccgcagaattacaaagtttgggttttaaaattgtcttttttcccttgactgcgctgatggttgtcactgaagtaatgagtaattgttttcaacatctaaaagaacagggaaatacagctaatttatcgggtttgatgggttttcaagattttcaaaatttgatgggtgttcctcaatatttgcaagttgaaaagaagtataaagagtaagttggtgattggtgattggtgattggtgattggtgattgggaaaaattaacttttaactatcaccacattgatcaatctttggagttagactaaataagaacagcatacagtgattaattatggttaactctcctttagttttaacaactatccccactgatacttgggtagaagcaacttgggaagattttctcacttttgcagttcaaggagtcaggagtcgtaggggcgaagcattcggaaaatagcctgtgataaaaattgataatttatcgtccgaatgcttcgcccttacaggaaaatagcctgtgataaaatgtgataaaaattgataatttatcgtccgaatgcttcgcccttacaggaaaatagcctgtgataaaaattgataatttatcgtccgaatgcttcgcccttacaggaaaatagcctgtgataaaaattgataatttatcgtccgaatgcttcgcccttacaggaaaataacctgggacaaaaattgataatttatcgtccgaatgccgatgcttccagcacgcttcgcgaacgcccgtacaggagtcaggagtcagtggtttgactttgctttttccttctgcctcctgctttgtcataacgacaatttttcacacccacttggttaacttttgtaaatttgagaactggggaaaatacagctttttaactaccaatatccttaatatttcgttgtttgcgggattgtaacggaatgttaagaactttgataagtttggcgcaagcagctataaagatttacatttagtaatgttctgtgattttgagaaaatgttggttttttgggttgacatctgggagtttttcggttaaattatttttattggctggaaacagcaatctgtaccaagaaaattaaatactgactttgcttgttacatctttgtttccgtagcttggcgcaaatgccctttgaaagctaaatgtaacaaggtttccgtgagtatagggtttttcataaccttttccccgcaaggggatggaaaccattcctcagccttggcctcttgaagaacctgttctttttcttgtttttcataaccttttccccgcaaggggatggaaacatttgataagctttttaaatatgaaatgtgccaaaaaagttttgcaccctcattttcgcaataaaccctagccattctcaagattattgctataaattctcaactatttaacgagttttggttttttcagcgattgatattgacatacactttttttctggtatgatccaagggagttatatatcttccaataaccagcaggaattattttctaactacacttcttttaatacacttcctaaactattcactaacttattaatatgctctttttcatgggttgccataattgtaactctaatacgacttgttggtactgtgggaggacggatggcaggagcaaaaatacccgcttcctttagcttcttacctgctgttaaagctgtagctgcatcaggtaattgaaaacagaagatcggagattgggaaggtaagatttttaagttaagtgttaacttagttaaattttccgtaaccaaatgttttaaataatcaacatttgaccataatcgctgacggcgttctggttgttgttgtactatctgaattgctgctaaagctgctgctgtgtctgctggtgatagggcagtagtgtatatccaactaggtgcgcggtttttgagaaagtcaattaattgatgacttcccgccacataaccgcctaaacttcccaaagctttgcttaacgtgccaacttggattaactctctgcctgtacaaccaaaatgatccacacaacccgcccccgtttttcccataactccggtagcgtgtgcttcatctatcagcagcatacaactatattcgtctgctagatccaacagttctggaagaagacacaaatcaccatccatactaaaaacgctgtcggtgataatcaaacaacgtcggtatttttgacgttcttggtttaactttgccgtcaacgccagaatatcacaatggggatattctatgatggttgcaccgctaagaattgccccattttttaaactggaatggttatattgatctgataaaattaaatctcgctttcccaccaaagcagtaattgtaccgagatttgctaaataaccagaactaaatactacagcgtcttgtgtttgtttggtagatgcgatcgcctgttccaattccctgtgtaattcccgatgtccagtgagtaatctagaaccagtgctgccagtaccgaattgttgaatagcttgaatagcagatgtttttaaattttcatctgctgctaatcccaaataatcgttactagcaaaattaatcacctcttgcccagataacagcacaaccgcaccgggtagactgccaatagtttgtacagaacgataccaatcagcccgatgaatagttgttagtgattcctgtatccaagcgtaaggattactcattttggattttagattttagattttggattttctaattcccaagtcccaattttcaacacaaataaacagataatttactgatgacgcacgcaaaatacctctgtaaccttctttcctttgtgtcctttgcgtactttgcggttcgttaaaaagaccaaagctgtcacctgtcacctgtcaccagccatctgaactacttcactactgctaagatgagcgatcgcttgtttaatccaatcctccacataggcatctttagttaaaccgatatcttcgctaacaacgtgcaaagcatgactaacttcatggggagtgtaacccaaagcaaagagagtcatttgcacttcttccaaaatacctggtgctggaccaccggtagccacaaaaaaccctgctgacttacgccactcaatcagtttacttttgagttctaaagataagcgttcagcagttttcttacccacaccaggggtttgaatgagcatattaatattagcagcaatgatcgcctgtactaactctggtaattccaaagtatccaaaagagcgatcgctaaagctgaaccaataccacttacagacagcaggtgacgaaataaatctctttccgcaggggaagaaaacccatagagtacaggaacttcttcccgaatctggtaatgggtaaaaatttgtaccacatcaccagtattacttaattggttagcgagacgttgggggatttgtaaatcatacccaatgccatttacctctaacgtgagaatcgtgcgattcgcgctaaccgtttgcacaccagccacaatacctttgagatagcttatcattttaggaacttaaagtattttaatccttccataatccccgcagcacaatgcttttgtgctaagtaacgatattcagcaggatactgattgtgccattgtagtaattctggtctagcattaccgacaatgataccccgttcctcacctactgcgaataaagcaatatcattacctgaatcaccacaaacaacagtctgctcggctgcaaattgccacttttgtcgtagaaactgcattgcttgacctttatcgctggtaaggggcaaaatgtcaaggtctataccgctactataaattaatttaatattaagttgaagtttttgcaattctgcctcaagttgtggtataatacttgcaagtttttcttctaagaaaaaactgaccttaaaaagacgttgttcggattctggttgtaattccaattcggggaatttttgggtaatctccagtatagattccctttgccatccgggagcaagaatttttgaccattggggatcgggagtatcgctaccatcgagataaatttccgtacccacagataaaaccagtgcatcaggtgggatgaggttcttttcctgttgcaattcgcggtagagaatcggagagcgacctgtagagtagactatttttgtaccatgttgttgacgatgattttcgaggcgatcgctcaattctagcaaagcttgatcatcaccaacaagagtattatctagatcagttacaaataaaaacttagtcacagcgatatcctcaacttgcgtgcttattgacatcaatacttggaaagattatcgcagactgaggaaaatttaacattttttatcagaagtgaggagtcagtaagggtgtagcactgctaaacccgtacaggagtcagaatatttatttatgacaggaatctataaaagcaacttttttgatcataattccatcaattatcttcttactttgcactttgcttctttgtgcatttgcgcgaaactttaataccaagtataattaaaataacgctattgaataagtgaataaaaatcatgactgaacaacttttagacaaagttgatgatcactatattccagatgctaatttactgattacagaagacgatacacctgtggataactttccatctgcaaaacaacaacgacttttagttagttcgctttacagtgatttagaattacaaccttgtttaatagaagccaacgtaggaatttatcataccgatggagaacctgcaatagtacccgatgtctttattagttttgatgtgcaaactcccgaagaatggtggaaaaaacaaaatcgttgttacatggtgtggaaatttggtaaatcaccagaattagtcatggaaatagtttctaaccaagaaggggaagaactcaccaaaaaactgaaaatatacgaaagaatgaaagtcaactattatctagtttacgatccgaatcaagaactaggagaagaaaaattacacatttatcaattagtcggtagacattatgcaaaaacctcagaaacctggttatcagatattaacttaggtgtgacattttgggaaggagaatttgaagggagaaatgatatttggttacgttggtgtgatcaacaaggaatggtaatacctacaggtgatgaacgtgctgcaagggagaaattagaaaaagaagaagcacaaagacgcgcccaagaagccgaaaatcgcgcccaagaagccgaaaatcgcgcccaagaatctgaaaaccgcgctcaattattagtgcagaaattgagagaattaggagtagatcctgatacaatttaaaagatgttggtaacgggtaatgggtaatgggtaatgggtaatgggtaaataattatttcctatttcctattccctattccctaactttaaggaatacccgcttgttgaaaaatttgttctgctgaaattaccaaacctggaaatagagaatcttctaaactatcattaccccgttttgtttggggacgtgcatcaggataaaatatagtgacagttttcgctttcggatctattacccaaaccctcattacacctgcatctagataatttgtagctttggcactcatttctccaaaagattgatcaggtgagataatttctattactaaatctgggggaataggacaaggttcattttcaatgacatcactcagaaaacgggaataagaaacatataataaatctggaacagggacccaatctttactgcaaagttttaaaataactgcccattctatacctacttcccctttattttctgcccattgtgtgagaattaaacataatgcaatagttaatcgagaatggaatctttttggtgacatttttggtattgcttccccgttaactaattcataagtgatatcctcttctgcaaggttgagaaattcttctagtgtcagttgatgtttaatagcaatcataagtttgtcagaatgataatatccaggattttaggatttacaggatttggtttatctgtgcttatcggcgttcatccgcgttctatttttgatattttttattttttattgatggtagataactttttttaacgaaccacagaggcacagaggacacaaagaaaaaattaaagttagtgaagtttagatgtctgcttttttggttaatcttgattatatcagatgttatttttaaggatataaaataacatcctgtacatccttaaatcttagatatcatctcaacttcacttgataacccaccaaattcattttcctcgttcataaacttatcaaacaaatcaaaaaatttatttaacccatccgtttcatcaacagaataaaataaaatgatatcagcccaagactgagaagatttaatattatatcttgactgtatccattgttgaaacctattcaaagtttcttcctgttctttgagaggaaaacccaaatcatttcttgcacctatataaccatctaaaaatgcttttattcgagtcacataaggtttacctaaatacattcctggacgggatttaattcttttcattaattcataaatatcagtcataatttacctctttgattaaaaaaactaaaaatattcttccgtaatctcaaaatctttacctgctaatttattctcgttcccatactctgtatgggcatgaataattgaaggctctgccttctgctgtatactagagtcagagactctatatagcattcccagtcagagactgggaacgagttgaatcaccaattactaatcacttaaatctcacaacttaactcatcagctttttgcgtaaacttgcgattttctcgatagtctaccctacaatctataacagcagggacatcttgaattaaagcttcttttaaaacaggaattaaatcagttacagactcaacgcgataaccttttaaacccatactttccgccaatttaacaaaatcaggatttccaaaatggacaaaagcagcgttacctttaccaaattgattttcctgtttccactcaattaaaccatagccaccatcattaaaaattaaggtgacaaaagcagtacccactcgcaaagctgtttctaattcttgacagttcatcataaaaccaccgtcaccggtgacagcgacaactttatgattgggatagactaatttagcagctaaagcgccaggaatagcaattcccattgcggcaaaaccattagaaataatgcaagtgttcggactatgacaatgataatgtctagccatccacattttatgtgcgccgacatcagaaattacaatatcatcgggtcccattacctgccgcaaatcataaattaatttttgtggtttaatgggaaatccatcatcattggcatatctttcataatctgcgcgaatatttggacgtaaactaatagcataaggattaggtttaccttgtctatcagcgacttttaaaatttcattcagtgcatcagaaatatcccctactacttccactttgggaatataactactatcaatttctgaggaagtagctgcaatatggacaatgggaatattaccttcaggattccattttttaggcgaaaattcaattaaatcataaccaattgctatgactaaatctgcatgatcaaaaccacaggtgataaaatctctttgttgtaatcctacagaccataaagccaaaggatgggtatagggaattactcctttacccataaaggtattaacaacaggaatatttaattgggtagcaaattgggtgacagcgtcactagcttgggcgcgaattgctccatttcctactaaaatgatcgggtttactgcttgggaaataaccgcagatgcagcgcgaatactagcaaaagctgcataggttttttcaatgtgatctctttgtaaaggtttgccttctacaggcatggctgcaatattttctggtaagtcaatgtgaacagcaccaggtttttctgtttgcgatcgcttgaaggcttttctgactacttctggtgtaatactcggtctaactatctgtttattccatttagtaaccggggcaaacatagccaccaaatctaaatattgatgagactcaatgtgcattctatctgttcccacctgtccggtaatagctactaatggcgcaccatccaggttagcatcagctacaccagtcattaaattagtagcaccaggaccaagagtagaaagacaaacccccgccttaccagttaacctcccataaacatcggccatgaatgcagcaccttgttcatgacgagtggtaataaattgaatggaggatttttttaaagcttctaaaacgtgcaggttttcctcaccaggtaaaccaaaaacgtactgtacaccttcattttctaaacactgtaccaataattcagcagtattcatgattatttcctcaaagtaataattaaaggagtcaggagtcaggagtcaggaggaagaagaaagaatgaatttttaaacttttgccttttgccttcttactgtcacctgtcacctgtcacctgtcacctcatccaaactgtcttgatattcacaaattcatgaataccttgaatacttaactctcttccatatccagaacgtttaatacccccaaaaggtaaacgcggatcagatttaaccatgccattaataaatactgccccggcttcaatttcttgaatgaggcgatttttttctgcttcattatttgtccaggcacttgcacctaacccaaagggtatatcattagctaatttgatcgcttcattaatatccctaactcggaataataaagccactggtccaaaaaattcttcctttgcaataggatgttctaccgggatatctataataatagtaggtgggtaaaaattgccaggttgatcttttaaagcattaccacctgtgaggactttagcaccattttctaccgcaattttcacctgattttctaaatcttggagaatatcgggtgttgctaatggtccaatatctgtatcatcagccaaaggatcaccgattttcaaagtttgaaattttgctaagagcattttttcaaactcatcggcaatttgatcagcaataataaaccttttagctgcgatacaagattgaccattattgatcattcgtgctgtgactgcggtggctactgctaattctaaatcagcactttctaagactataaaagggtcacttccccctaattctaagacagtttttttaatttgtttaccagatgcaaccgctaaagaagcacctgcgggttcacttccagttaatgtagcagctttgatccgatcatctgccattaaatcagctacttttgtagcacctattaataatgtttgaaaaactccttggggaaaacctgcacggttgataatatcttctattgctaaggcacattgggggacattagaggcgtgtttgagtaaacctacattgcccgccattaatgccggtgctgcaaaccgaaaaacttgccaaaaagggaaattccagggcataacggcgagaataacccccaatggttgatattttatgaagctatgacttgcatcggttttaactgagacatcagctaagaaactggcagcattttcggcataataacgacaaaccagggcgcatttttccacttctgcgatcgcagattttaaggttttacccatttccaaggtcatgattttggcaaaatcagccttttcctgttctaaaatattcgctgcttggagtaaccattgcgatcgctcctcaaaacttgtctgacgatactcctgaaaactttgttgggctaattccactttagccgctatttcaccatcctcaagcggttcaaatactttcagagtttcccccgtagcgggattaatggtagcaatagccattccctgatctcctgttaaaaactaacttcaggtagtttcctagtgttacacacattcacgatagcagctactatcaaaattgggtgttgcttaacaaaggcaggagatatggaaaccgttgtcaaatcaatgtggtggaatttctaaaggtatattacctaaaagtcctttgcgaaaatcgctaactaaagttctagcagcgcgttcaacatctcctttataacgatgttctgcgagaacgtgcaaatattcttctcctgtgtgaataatagaatcaacttcgtagcgtgaaagtaatgggtgtggtggtaataaatgaggatggctttcttgcagttcgtttaaaatatctacaaaagcagccgccactaattgattatcataggatgcttcgccaatatcatcacaaattgctaatttgactgcggctgcttgatcatctaatctagcaggaataacaccaggtgcatctaataattctaattgttcagaaattctcacccatcgtagttgacgagtcactcccggacgcgctgcactttcaacaactcgctttcctaacaaacggttaattaatgctgattttcccacatttggaaaaccaatgacgactgcacggacaggacggggtaacattcctctttgttttcggcgttcattcaattctacccctgctgcttgcgctgctttagctatggctgtgataccttgaccatgttgagcattagtaaaataagggacttgttcttggcttttaaaccattctacccacagcgatcgcacttgggggtaaatcatatctaaacggttaattactaacacccgcgacttactccccacccattcattcatttgcggatggtttgtagctaagggaatacgtgcatccctcacttctaatatcacatctaccctttttaactgttctttgagatttttttcagctttggcaatgtggccaggataccattgaataagatttaatttgtaattttgtgtgatggacattggtgattggtgattggtgattggtgattggtgattggtgattggtgactggtgattggtgactggtgactggtgattgggtaaaaataactaataactaataactaacaactaataacgtaagttgctagttatgcaagaaaggctctcaaatcgaagtaacaaggataagtagatagcaataaagcagggaacacaatcataattcattctttttcctgactcttgactcctgactcctgactcctgactcctattcctaactagcaacttgggttaataaccttgatgtaatattaaacgattgccatcggggtcataagcgtaaatttctctaccgtgggatgctatagaaatctttcccggtgggggataacctaaagatgtgaggtgtgcgatcgcattttctaaattactcacttctatacacaaacttagcggacttttgctattgcttacaaattctgattcatcatttttctttggtttaaatatacctaaagttaaactcaggatgttaaactctgcataaacattaggtatcatcttttttggttcttgttctagtaactgaatatagaaatttaccaattgatcaaaatttaccgtgccaatggtgactaatacattattatattccataaatgaataaattatacaaattttataaaattattataaaattattataaaattattaaaatttaggaacaggcaagatgcctatcccacaattatcacattagattagattagttcaaaaatttctcgacacatctaacaaagatttctacacccatagctaacgctgtttcatcaaaatcaaaacgcggatgatgatgaggataatttaattttttctcagcattggcagaacctaaaaagaaataacaaccaggaacttcttgcaggaaaaatgacatatcttcactacccataatttgacattctgggataatattcacaggtgtttctactactgtttctgctacacttctcactaactctgctatttctggatcattaatgactggaggataaagattgacatattctaagtcataattagcgccatgagtttgacaaactccagcaataatttgttcaatccgtttttcaaaaaatcctgctaaatcagtgttaaaatatctgatagatccactcatccttgctgtatcagcaattacattcattcttgtgccggcgtggagttcacctattgtcactactgctgattctaaggggttgacgttccgcgctacaattgtttgcaaggcgttgacaatttgggctgcaactaccactgaatcaactgtttgatgaggtagcgcaccatgtccacctttgcctaaaattgtacagttaaaataggagatagctgccataaaagcacctggacgaactccgacaatccccactggcagatcattccacaaatgtaaaccgatcatggcatcaacatctgggtttttcaagactccagcttcaatcatcggttttgcaccacctgggccttcttctgcgggttggaagatgatttttacagtaccgctgaattcttgacgatgttgttgtaagtagtatgctgtacccattgcgatcgctgtatgtccatcatgtccgcaagcgtgcatcactccatcatgctgggagcaataaggtacttcattttcctctttaactggcagagcatccatatcagcacggatacctaaaactttatcagatccagatttttcacctttgataatagccacaatgccagtttccgcaataccggtttgatgttctattccccaactttgcaacttttgggaaatatactcagcagtcagtttttcttgaaaacctaactctggtttttgatgtatgcgtcgtctccattctattaactgcggttgtaaagcacgaatttgtaaccgcacattagcaagattttcagtattagaatttgggatagtagaaatcataatgggtaatgggtaattggtaattggtaatgggtaatgggtaattggtaattggtaattggtaattggtaattggtggtaatgggtaatgggtaattggtggtaattggtaattggtaatgggtaattggtaattggtaattggtaattggtaatgggtaattggtggtaattggtaattggtaattggtaattggtaattggtaattgggttattcatcttcccagtcaccagtcaccagtcaccagtcaccagtcaccagtcaccagtcaccagtcaccagtccccactccccagtcaccagtcaccagtccccactccccagtccccagtcaccagtccccagtcaccagtcaccagtcaccagtcaccagtccccactccccagtcaccagtccccagtcaccagtcaccagtcaccagtccccagtccccagtccccagtcacctacaataatctttcccagtctaaattagatccaacttccgctagttgtactaggttatttggatcttctaaaaaaggtaaacaacctaaaacggggatgtgagtaaatgattcaattaactccggtggtgttaagtcagctatttcctcatcaaaccgtggttgtgtacaattaaggacaattcccttcaaatttatcttagcctgtcttgccaatgctacattagccacagattgagcgatcgcacccaatcgcacaggtacaactaaaaccgtaggtaaacgccattcacccgctaaatcagctaccgtcaattcatccgtaactggtgaacctaaccctcccaaagattccaccaacaaaaaatcacttcgttgttgcaactttaacaaagtttgccaaaccaaacctaaatctatagtccgattttccttagcagcggcaatgggtggcgctagaggtgcttgaaaatacaaaggcgtgagttcttctggagtctgacttagtgtaaaaagtgactgatataactccttgtcaccctccccagattgaatgggtttcataatccccaagcggctttgagggcgatatttttgccaataggctgctagagcggtagtcaaaaaagttttaccagcccccgtatcagttcctgtaattagtaatgtgtttgacaatttatttacgaataattactgtaaatgaaaaaatttagcccaaccggaaaatagctggactatctttaatttagcgttaatcgcgctaattactaggcgtaatttctggtgtgagagtagtttccgggatgggattattttctggtaagtctgtaccgggtgtttccgtgagtgtgggggtgggggtttcggtgggagttgaggtttcggtagggg

SEQ ID NO: 82 - DNA, 21755 bp, Sphaerospermopsis sp. LEGE 00249
  LEGE00249_100
ctcctgactcctgactcctgactcctgactcctgactcctgactccttgatctcctgactccttgatctcctgactcctgactccttgatctcctgactccttgatctcctgactcctgactcctgactcctgactcctgactcctgactcctgactcctgactcctaccccttgccttctgttgctaaattaacagtggatgttatctacaaaaaatcaacaatggtatctaatactgcatcatttcccgatattcaaaatcattgggcgcggttatttattcaggctttagcccaacggcgaattttaaatggctatcctgacggtagttttcgccctaatagccctgttactcgtgctgagtttgcggcgattatagcttctgtactgacaacaaccaaaaaacgggattatgtaccttttggagatgtacctgttacactttgggctaatagtgcaattagaaaagtttacgaaactggatttttggttggctaccctgatcagacttttcgccctaatgatagtatttccaggggtgatgttttagttgcgatggttaatggtttgggaattgctagtcaagtccaagctgatttagttagtagtttaggacaaatctatcaagatgcggctacaattcctaattatgctatcaatcaggtggcgatcgcctctcgtgttggttgggtggctagttatccaaatattaaattactcaaccccagaatggctgctactcgtgctgaggtggctgtgatggtatatcaagctttggtatatctgggaagggcggaaaaaattgcttctgaatatatagtagtaccaccatcgtctggaaaccaacccaggactttaagggtaagtcataaccgggagtttcggggtgcttggatcacaactgtgtggaatagtgattggccttccaaaccagggttgagtgtggaacaacagaaaacggaattactgcaaattattcaacaattacaatctttaaattttaacgccctaattttacaggtgcggccagaaggggatgctttatatgcttctagtttagaaccttggagtgcttggattacgggaactcagggaaaagcaccagaaccattttatgatcctttggaatttgcgatcgctgaatgtcataaacgtaatattgaagttcatgcttggttcaatccttaccgcgctaaagcaactactaaaagcgggtttaatgtcggtccccatatagctataactaatccagaagttgtttatcaatggggtaatcaattatggatggatcctggctcaaaaattgttcaagatcgagcttacaatgtgattatagatgttgtcaatcgctacgatatagatggcattcatcttgatgattatttttatccctatcctatatctggtcaatcatttcctgatcaaaaaacttatggagtttatcaagctaatggaggtaaactcaggttagaagattggcgaagggaaaacgttaatcaaatggtgttgcgtttatcagaaggaattaaaaaaactaaatctcatgttaaatttgggattagtccttttggtatttatcgccctggacaaccaccgggtattgttggtttagatgcctataatgccctttatgctgactctagaaaatggttgcaagaaggttggatagattatttagcaccgcaactttattggcggactgatcaaacacaacaaagttatgaagtgttgttgaactggtggactcaagtcaatactaaacagcgacatatttacgctggtaacaatatttccaaactagatgggaaagcttggaaaaattcggaaattgaaaaacaaattctcatttctcggaacttagctaaaaatttgtccttgggaaatatattttttagtatgaattctatcaaagaaaatgtccaaggtattgctgatcaatttaaacaggtttattattctcgtccggccataattcctactatgtcatggcaaagtcaaaatcctccttctcctcccaaagaaattaaatttgaaaatggtagattaaattggcaaagaggtgatgataaacctgtgcgttcttggactctttaccgtcaaagtggcgataattggatcattcaacgcattttgtctgctggtactacttttgctaccgtaccaccaggtacttatgcggtgtgtgcggtggataggttgggtaatgagagtgtgggtgtagtaattactgtaacgtaatctgaggaaggcagatgattatggcgatcgcactttggctattttgagaaaactaacaaaaattaaataaggtaggttgggttgacgttaggaaacccaacatttacttacttttgttgggttgcgctgtcgtttatattgggataggttgacgttaggaaacccaacatttacttactttcgttgggttgcgctttcgcttaacccaacctacaaactacaaaataacaaaaattaaatgaaacaaagactagacacactattagtagatttgggtttatgtccttcccgtcaacaagcacaaagattaattcaagccggcgaagtcatggtaaaccaaacaataattgataaacccggaacagaagtagataaaaacgcagaaattcaaattaaagaacgtcctccttttgtttcccgtgggggtgaaaaactggctaaagcattgaaattttttggtatttccgcaaatcaaagaatctgcttagatgggggaatatctaccggcggttttaccgattgtttattacaaaattgtgcatcaaaagtttatggaattgatgtaggttatggacaagttgactggaaaatcagaagtgatgaaagagtaattttaaaagaacgtaccaatttacgagaactacaaccagaaaaattatatcctgaaggggcaatatttccagatttagctgttgtagatgtttcctttatttctttaaccaaagttttaccagcaatttggcgtttaacccaagcaccaagggaagcagttttattagttaaaccacagtttgaagtgggtaaaaatcgtgtgggtaaaaaaggtgtagtcagagatccaaaagatcatgcagatgcgatttttcaagttttgcaaacagcgttagaattaaaatggaaatatcggggtttaactttttctcccattactggacctgcgggaaatattgaatatcttttatggttagggatggaaagtgaaacccaaccaccagacttaacaagcatccaagaaatgactaaaaacgctgtacaggagttgacaaaaaatgagcaataatcatcaattaagtttaaaaaccttgtatgaacaagattatcaattgtggttagatggaacaattgaaaatttaaaacatcgtaattttgataacttagatattgatttattaatagaagaaatagaagaaatgggtggcagtttaaaagatgctttagaaaataatctcattgtcattttagcccatctcttaaaatggaaatatcaaccagaaaaacgttcaggaagttggaaagctagtatcaaagaacatcgtcggcgagtgaataaatctatacaaaaacatcccagcttaaaaatttattatgaaagtattttttcagaaagttactctcctgccgtagattgggcaatagaagaaacaggattatcacctgatattttcccaggaaaatgtccttttactcctgaacaggtgttagatagtgagtttttacctagtccataattatgctcgtagttgcgctttagtgcaaatcctctaacaacatccccaaaaaaccatcattgaacaaccatagagttaaaatagagaaattgtgaaaagatagaaaatcaaatgttttgggctgataaaatcgctgctgatacacaaggctaccaggtagttaatgattctaaaactccttcaggacgggtccacgtcggatcattgcggggtgtggttatccatgatgttatttaccgtgccttgaaacacgcaggtaagcccgtaaaattcatgtacggtgtggatgactacgacgcattggataccgttcccaaatatttagacaaggaaaaatttaaaccatatttgggtttccccctgtgtaacgtaccttcacctggtgagggtgcgagtgattatgctaaatatttcattggcgaattttttgaaatttttgagtatttaggaattaaaccagaaacttattttttacgtgatttatatcgttctggtcaacttaattcccacattgatactttcttaaaaaatgctcatcttgtgagagaagcatataaagaagtaagtaaaggcgatcgccctgataactggtatccttttcaagttatttgtgaaaattgcggtaaaattgccacaactgtaaccacagattataacggttcagaagttttttatacttgtaaaccagatgcaactgactatacaaaaggttgtggtcattctggttgggtttctcctgttaatggtaatgggaagttaccttggaaggtggaatgggttgcaaaatgggatgtgttgggtgtaactattgaaatggcgggaaaggatcactcgcaaaaaggtggttctagggatgttgctaatgcgatttctcgcaaagttttacaaaaacaaccgccttttcattcaccctatgaatttattcttgtcaatggtacaaaaatgagttcatctaaaggtgtaggttcgagtgcgcgggaaattgctgatttattaccacctgagttattacgctttttaatgttaagaactcagccgagaacggtaattaatttcgctcccaattatgaaaccatcacccgattatttagagattacgatactttaattagtaagtatcaagataattctgaattaactgaagaattaatgtctttattttatgcccagttgggtgatgaggttaaaccatttcaaccttttgattacagtacgttaatttccctgttgcaagttccgcgtttaaatattcaggatgaggttgtacaaagaactgcaaatcctttaactgagtatgatcaatttattgtagatcaaagaattgcttctgctcaaaagtggttgcaagactacgcagatgaggaagaaaagctagttctatatttagaacaagttcccgaaaaagctaatactttaaccgcagaacaggtgagttatgtacagaagttagcggagaatttgcagaatgctgctaactgggaagcggaagaattgcaaactgtgattttctcaacaactaaggaattacaaattcctccagcaaatgcttttaaagctttgtatttggcgtttttaaataaagaacgtggtccaaaagctggtggtttgttctcttatttagagaagtcttttgtgatttctaggttgcaagaagttgtagctttgaatcagtccaaagctgaagtttaataacttgttccctgtctctgacagggaatacagtttttgagtctccgactcatattaatactagcagaaggcagagccttcttgattgcattcccagttagaaactgggaacgaggggaaataactttttcagcaaaccctatttattcaggtttcataattttgatagtaggtcttcatgttcaaaatccttctgcatagctttattatcttgatcttgatcgcggtgtttaaactcctctaacaaagtaaaaaacctgttaaaagcgtctttttcatcacgggtaaataataaaataatattcgcccaagaattagaagttctcacattaaaatgttgctgtatccaaggctgaaaattttcgtagaaatctgcttcttcctgatttaattctaatcctaactcattccttgcaaatttatatcctactagaaaatgacataaaatagtaatagaagaattaccaatatacattcctggcctgtgttttattttttgtaaaacttcatatattcctcccatattaacctccttgctgtggtggtgctggttttactatagcaaatctatttcagtgataataaactcacggctaagacaatcaaaatcatttaccgaatcctctctagtcattccttcaactgagagattatcaaaaactttaccgaaaacctccactccataatgagtaccattttgtgtaattgaattggtgatatcctgtctttctaaacgattactcaaaatatattcatctgttctgttttttgtttttaatttgagaattttagcttgaatattgttcttttgtaaccattggtatatagccctagcacaatcatcacattgataaagatcaaaattttgaatgatttttccaatttctcgaaaaatatcctcatcagatgattgactcacccacacctccaggctaccgctaatttatcaacctttatattttcttgtatattttcttgttccctatctttgacagggaatacagtttatggtaaaaattccatatccagaatttgagttacagtgtaaggtaaatctgctggaaaggtattttgagaaattcctgtttcgttacttgctagttttttgcctctgcggtagcactcagctaagatttcttctaaataaggattaagactaggactatcttgtaataaatcttcaatacggttacgttgttctgtaattgtattttgccaagatccacttcgcaaattaggctgatattgccattttagcaaatgctgtaacaatacctccaatctgcttttcaactttcgtttatccgactttcccaaactttcaatctcctcaacaaccgcttcccaatctaccctatcccatttttcagcgcggattaattcagccgtttgttgtgtccatgctaaaaaatcagtatcatacaatcggattgctgtcttgggaatagaaaccatgatgtttttctcctagtctctttttatggggagcatcccaaatgtgtaaatttattttgatctaacggaaaaactctccaaggtcttgatatgattgaaccgcaaaggacgcaaaggacactaaggtaagagagtttaaaagattttttagtgttgctgtggttattttttcaaaattgggatgctccctttttatgttagcagaaggcagagccttcttgattacattctcagttagaaactgggaacgaggataacgagaataaattcaaataccctgacgaaattttctaattgcttctaagggtgaagataacaaaatacaacgacttaataaagataaatctaactctggtaacaacacactattactaactttctcatattcttgttcttgtaaacaataaacctcaagtgtgccatcttcccaaaaccaaacttcaggaatttgcattaatttgtatttctgtaatttaataggactaccgctagtaataactacctctatacacaaatctggtctatctttatctgtgcctaaacaataggataagtcggcttgataatcaactataccaggaataacttgattaaaactgccactaggaaaaaattcaatttctttgtctaaaaaatactgtcctagcaacaaacctattaaagatgttataaattcatgtgctttacctatacccacaatttctaaaactccctcacaataaaataaacgcacccctggcacattttcaaagctgttttgaattgcttgaaatctttcccaactaactccccgacggtagaaacgttgttcttcttctggtaaaccaatggaattttctaaggcttgagtcataatttttttcactctccctagtgacaattttaattataccaaatttagatccccctaacccccctttttaaggggggctaatatggctaatatttattgatattatgttaaaaccaaattatcccgatgaatgacggtttctgcacctgcataacctaaaattccttcgatatctcgtgaatgacaaccacgaattttttgtaattcttcgctgctataattcaccaaacctctagcaatttcattaccatgaatatcacatatttgcactgcttcttggtgatcaaattccccttctacggttttaattcctgctgctaataatgattttcctgcttgcaaaatagcggcaattgccccatcatctaaatataattttccagatggaactaaaccataagctatccagcgttttctcgctgatgttggttctggttggggtgcaaaatgcgttcctatgggttctccgttgatgattttttcaatgttgtggggaaaacgtccttgagtgatgacagttcttactcccgcagcgatcgcaattctggctgctgatatttttgttaccattcccccagtcccccactgtgaaccctgtcccccggtttgaatctgtaattctcctaattccttcatattactaattaaagaaatgggtttagcgtcgggtactgtacggggatctgctgaatataatctatcaacgtctgtcagtaaaaataaccaatctgcctcaactaagctggccactaaggcggaaagggtatcattatcaccaaatttcaattcttctatggctacggtatcattttcattgactatgggaattactcccagtcctagcaattcctgaaaagtattataaacgttaagatagcggctacgttgcactaagtctgatctcgttaataatacttgggctatgggttgttgtaatgtagtaaataaatcatcatatatacgcattaaacgaccttggccaactgctgctactgcttgtttgagggcgatcgctttgggacgttctgttaaacccagtcgcgcacaacccacacccacagcaccggaggaaactaaaatcacattatgcccctgttgtcttaaattgcaaagggtttctgttaagctggcaatggtagaaagggctaattgtcccgtttctgcttgggtcaggctagaagttccgatttttacaactattgttttagtcattagtcattagttattagttattagtcattagttattagtcattagttattggtcattagtcatgagttattagttatttttcccaatcaccagtcaccagtccccaatcaccaatcacctatcaacacctaaaaaattgtacagcgccaatccctctatcgtgaaggctgacgctgtacgggtttaaagttatttttaatcggctagggtctttatttgcttgaccccatgttattaatacctataatctccgattttttggaacattaaggatttctttagtatttctttagatttacttttttattgatttatcaatctttgttaatttttgtgtatttgggagaaatagaagcgccaagtatttctgatacccaaacttcaaagttgcgaataggatgagaacgaagcacagtatcagcatgaacaataggttcaactaaaatagtaaacattcctaaacgattacctgctatgacatcagtaaataagcgatcgcctaccatacctacttgatgtacaggtaaattcattccttgtaatgcggctctaattttacgacgtgagggtttagccgcacccaggtaataaggaatattcagggaacgagcaatactaccaattcgggattcactgagattattactcactaaccaaagagccgcataatcacgcatttgttctacccattgttctagttctggggaagcggcgctggcagtaatgggtactagagtatcatcaacatccaaaaccagccctttgagtccatattgttggatgatatctggcgtgagttgcaaaactgaaccttctaaaatcaagtctggttgtaaaatattgttccaagtcttcataattcgtaattcatacatgaggtgacaggtgattggtgactggtgactggggaaaaatatttcccttctgccttctgccttctgccccctgcttcttctgcctcctgaactcctgactcctgtaataaaattccattgccaatcaagattagactagcaatggaaacattaaatttcagttatgaattattcaacctgatcaaacagatgttcttctaaaagcggttgaactttacgaaattcttcaggagagagtaattcaggcttacctgacttggtgatacgggcaaaaaatagcaggggatcaaggggggtgtaaactgcatactcctggtcttgatgatagaaactagccagtagctgtagttgttccggttctaaatctgttccttcatcttcgatttctaaggtgaagatttctgattcttctactggtggtaattcacccactacagtcaaagcataagcagtatttttaatagtcagattttgctcagagagaactgcttgagcggtactaaaaatctcatcaattaaatcgtcatcttctaccaaaatggcttcttcttcctcaccatcaccttgccaagcaaaaatttctatgggtgagtcaacaggcagaagtaaaacatattcttgcctatctaccgagagagaatgctcaatataacattcgagcgatcgccctttttcatcggtcaaagtgatagcagcagcgtcagcacgatcattttcttcagaaaattcagatgaatacatagtcacattatctaaacttatcaatactcaaatctatgaaattcatttaactgttttatgacagtcaatgtcaaccaaaaagctgaatatacagttgagtaatagttttcagaatatcatgttccaaggtattaatcctcaacaaatgctaccgatctgttggagttactgcgtctagcatctagccactgttgcaaaattaaagctgcggctttccggtcaatcaggctcttatgacgtgatggcgagcgattttctgcaatcagcatttgttcagcttgaaaagaagttaatcgctcatcaacgtattcaataggcagatgcacagctttagccaacctcttggcaaatttctggacgtgtcgagcttgaaaacctaaagatccatccattgaatatggtagaccaacaaccagaacttgcacttggcgatcatgcaggatttgttgtatttgctccacatcatcttgaaaggatcggcgctcaatcgtagtgatacctgtggcaatcaaaccagtaccatcgcaccctgctaaaccgatgcgtttgctaccaacatccaaacccaaggcggatataaaagattttgattgctgctcaagtatcactctaattgttctcctggtgtgcctctgatgattcagattggcgatatgtatccatattatgaaattgttgactaccaaaagcaacagtttctgacttatttgctactgttcgctctgaggcaggttgtggtttaggaacccatgacataccaccgggtatgggtttacgtgctggttgtagtccttgcagcacttctggccattgtatgccttccaaagaaacgaatttggattcgcggattttatgccaaacggaacgcgacataattagggtatgttcaatgcgtttagcaccaattctttctaaatattcttcccgttctggctgataatcagaggaagccagttgtaaaccttgttggggaaaatcttgagcaatgcgagctaattgagacaataattctggatacaaccaagtataggctgggtgaaccgtcaaactcgctacatgaggattttcgcctttccggtcaagttgtacctgaaaatagccaatagctgctttgcgttggggttcaaacacataaccgctgacaacttctgtttttgtcacccattgcttcacagcatctgcaagaacaccgaataaactggttttaaaatcatgggtatggcggtcaaaaacctgacgtaccaaaggcggcatggatgctgtatctagttgatatagtaatggtgcatcagcattactaacgggtaagaggttgggtaagtcaggttctgcttgtgctaattctcgcagtaactctgggctaatttcccagtaggtcatttctgccaaccgctgaaatccattttgtcgatatagtgctagagcatcaacgtcattgacattaatttctagcagccaggtacgagcttctaaaattgattcaaagcaatgcctaagtagttgtgaacctacccccagtttgtcagcagtacggtctaacattaccctgtcaattcgccaagtgctgcgggtacggttaaatggtgatacttgaatcattcctagcagcatccgtccttgctctgcgacaaatccgcagaagcggtactgtaaagggttgggaaaccaactcaaaaacttgagtaagccaaaccagtgacgcagccattgcatggtaaaaaagctgcccttgggagagaggtctgtataggaatcttgtgtgagacgttcaataccgtctagatcccgatattgaacaggacgaattacgaggctgagatttcgaggaagtagtgaattcattttgattcaagccgccatttagcctttactaattgcgatgggtaagctactgctgcaataataatcttaacggcttttcactcttaagttattgttccaaaagagtgattttattaactaaataccgaaaaaagaataaaaagcagaaattgtgatgacaccgttggcgtagacacaatcatatctgcttctattgtataagtttttctgaaaattctctataatgctcaggttttataaaccttgtctagaggccagcttttcaaagtaagcttgagtttgatgaagtagctgctggcgactatcttcttgtgtgtgttttagtgttggaaccaagttgcgagcttggagtgtcatgtgcaactgtagatgcgccacatattcactgatatcttggttttctacaactgcgcccgttaatacatttgattccattgccactgtgttctcctttatcaatgttgtgcggttgtatgacttgatcacatgatcaaaatatcatacttgtttgacttagcttattgatttgcaacgaactgtaatagttaggtattggggactggggacagaaggaagtttaccaattaccaattaccaattaccatttctctacccaatagataatttctgaggctgaactatcaatagcgactccatagctatgaccatgattccatttaaaccctggtttaccttggtcttgtgctttgaataccaagatttgatatgtactcggaaaggctaaattatcagatttaccagtataaaaaaatgttgtgggtacacctttagcttgtttgatatggtcgtttgtatcacccccccaatatttatgccctgcaattttactgtagtgtgaaagtgattttttaatttgttcaggaggtcgttttaaacggatttgaaaaaagttacttccttgcttccagcctggagagtaagccagggagatgaagtgatcactaggagtaatctctatggggaaatgtttgatttggttaagatcagaccacttgtgattgcgaatttctgaatagcgtgatatatcagtaattatctgtgctgttgccgtattgtttacagtttgtgtgaagagaaaactgcctgcaattacactggaactacccatagataataaacctattgtagcgattttgactaataaagattgctgcatttagttgagtaaatctagttggtagattaatatcccaactcatcaaacaaccgtcatgataatttttaatctatcaccggaaatattaattgtcagaagtcagaagtcagaagtcagaagtcagaagttaagagtcatataggactgctatttgatttgtgatagctggcgtggtgtagccatacaaattaaatgaaaggattttggattttggattgtatttaatcaactccaatctaaaatctaaaatcttgtcccagtcaacagtcaccagttaccagtcaagggtttcttttagaaagaaccaaaaatcattcctgctaaaatcaaaaatccaatccagacattttgacggaacatttctccataagcagggttaggtagttcggggtttctcaagcggataaattgccaaacccaaccaccagatgcaatgattaaactaatccagaaacatccattcaggttaactaacaaaccctctccagctaggagaatgatcgtaccagcgaagaaaataccaatagctgtgggggcatatttaccaaaaaagagggcgctggaattaacaccaatgcgctgatcatcttggcgatcgctcatggcataaatggtatcaaatcccaatgtccaaagtacagttgcaccccaaagtaaccaagtcggtgcggtaatgttttgtgtaactgcactccaactaatcaaaacggcaaaaccccaagcgatagaaagcactaactgcggtacaggaaatactcgttttgcaccaggataaagtaaaattacaggtactgctgctacagacaaccagaagcttaaagggttaagatagaaagcgagaactgcggcacaagccagggcaactatccctacagctatacccactttgatggatagggcgcgggaagccaaagggcgatcgcgtgttctctcgacttgcggatctatatctcgatcccataaatcattaactacacaacctgcggcgctggtggccagagtacctaatataattactcctactaggggtaaaggtggtttaccagcagctgccaaaaacacagcccatagtgcaggaatcatcaaaattaacctaccttctggtttatgccaccgtaacagccgaataataactagccataatggttcttggttgctttctggtgttgttagcatattcgcttaattcacatatcttcacatctatagaatatcgttatttgataactgtaaatacagggagcatccaaatttgggaaaaatacagcactgatgtcaaaacatgatttaattctctttacttttactttattctctaggacttacgcacaagtcacagaagaatgaagcacaaaggaacgaaggacacgaaggaaagaggcttggagagatattttgcgtcagtcctgttctctttactttgcgtctgtgcgatttattttttgataatcttgacacatcaacgaatgttccagcttgggatacaaattcattactttaattgtgtgtaatttcaccaaacaattaacctgaaaactctatatatttacaatacagtagatatagtgatccgatttgattcatgaatttttcctagaggcagggaacacttcgacaagctcagtgcatcgcagggaacagggaacagggaacgggaaagaaggctgtcagtatttatggtgagcgaagccgaaccatttacggagttctgttcaaaaatcaaatattagtcctatagcagatcaatcaggtacagaatctaatttgaaacctagactgaaacctagacagaaacagagttttactcctgactcctgctgtattgtcagtaataagtatttagtgcggattaaatcggcacaccagctttgaccatccattgttaagagagagaaacttaaatggtgaatgtagtttctgcgaactgggagaatatggcaactccaccagtcaagcaaaaccggatgattgcggccattgatatcggcactaattctttgcacatggtaatagtcaggattgaaccaacactaccagcttttacaatgattgccaaagaaaaagaaacggtgagattaggcgatcgcaatttagaaacaggagaattaaaaccagaagtgatcaaaaaagcgatcgcttgtttaggacgtttccaagcactagccaaaagtctcgaagcagaaagcattattgcagtcgctactagcgccgtccgtgaagcacctaatggtagagaatttttacaccaagtagaaaccgaattaggtttaagtgtagacttaatttctggtcaggaagaagcgcgacgcatttatttaggtgtgctttctggcatggaatttaatcaccaaccgcacatcattgttgatattggtggtggttcaacagaactaattttaggcgactcccaagaaccccgcagtctcaccagtacaaaagttggtgcagtgcgactcactggggagtttatcaccactgatcccatcagtgatacagagtttcaatatctgcaagcctacgcacgaggtatgttagaacgttctgtagaagacgtactttctaaactccaacctggtgaaattcccaagttagtaggaacatctggcacaattgaaactatagccatgattaatgctagggaaaagatgggtgtaataccttctaccctcaatggttatcaatttaaccttcaagatttgcggacttgggtaacacgcttgcgacgcatgaatggtgtagaacgggcagccatttcaggaatgccggaaagacggtcagaagtgatacttgctggggcagtgatattacaggaagcaatgaccctgttgggtgtagactcagtgacactgtgtgaacgttccctgcgggaaggtgtgatagtagattggatgctgacacatggtttaatagcagataaattgcgctatcaaggttcagttcgagaacgcaatgttctgaaaattgccaaaaaataccaagttaacctagaacatagcgatcgcgtagctaaattcgcattaagtttatttgatcaaactcagggaaaattacatccttggggtaaagacgaaagacaattactgtgggctgctgcaattttacacaattgtggtcactacatcagccattccgcacaccacaaacattcatactacctaattagaaatggtgaattacttggttataacgaaaccgatatcgaaatcattgctaatttagctcgttatcaccgcaaatcaccacccaagaaaaagcacgaaaattaccggaatttattgcataaagaacataaacaaatgatatgtcaactgagtgcaattttaagattagcagtagctttagatagaagacaaatcggcgcagtatctcatgttaattgtgaatatttgcctcatgcaaatgaattgaaaatgttaatatttccctctgaattaggtgatgattgtgctttggaattgtggagtttagattacaaaaaaggagtttttgaacaagaatttggtgtgaaattagtagcaaatttagtcaatactggtgttaagttttcttagttggtagagaacaggcagatgctgaaaattatgtattaattcttgccttctgccttgtgattaatgttcgtaacggggtcatcctaaatgtctaagtttatttttatataacaacaaaaaattattcccagctttgatatgatggaaccgcaaaggacgcaaaggacacaaagggaagagagtttaagagagtttttggagtggccacggttattttttatttcattaggatgctcccgttcctaaccaatactgttcggttaaggatttttgtaggttgggttaagcgacagcgcaacccaacaaacccttataaatgttgggtttcgttccattgcttcgcaacgctaacgcgaacaacccaacctacatgatttcatgtttttgagcttaaccaaaaactattgcgttcctaactagcaacttagtttattaattatgaatttatgaatgatcaattctctcgcatgaatgcggtacaatcaccaattattcctgatgaatgctattttagccataacttccccaggtgacgaaattatattaaacactccctattatttcaatcatgaaatggcaattacaatggcgggttgtcatccaattttagtagcaacagacgaaaattatcaattaattcctgaaaatatagcccaagctattacacccaaaacccgcgctattgtcacaatttcgccgaataatcccacaggtgtaatatattcagaagcagtattaaaacaaataaatcaaatttgtcgagaacggggtatttatcatattagtgatgaagcttatgaatattttacctatgagggaataaaacatatttcccctggtgcatttgcgggaagtaatgaatatacaatttccctttatagcctttccaaagcttatggttttgctagttggcgtattggttatatggtaattcctcaacatttattaaatgcagtcaaaaaagtacaagatacaattttaatttgtcctcctgtcgtttcccagtatgcagcattaggggcattacaagcaaaagaagattatgtaaaagatcatattcaaacaattgcccaaactcggaaaatagtaattaatgcacttaatgaattacaaggtttatgtaccatcacacctgcaaatggggctttctactttttcttaaaagtacatactcaaatagatgctttagaattagtaaaaagattaattcaagaacataaagtagcagtcatccctggtacaaccttcgggatagaagacggttgttatttgcgtgttgcttatggtgcattaaaacaagaaacagcaaaagcaggaatagcaagattagttaaaggattacaaattattttatcataaccacatatggatgaaggggactggggactggggactggtgactggtgactggtgactggtgactggggactggggactggtgactggtgactggtgactggggactggggactgggtaatcaattttatgttttttaatcaactattcccaattaccaattaccaattaccaattaccaattaccaattacctaaatcaaactctacaaattctggtaaacctggataaatcatatttttatctaatgcagataaaatttgattattagcattagtagaatttaaacaacgacaaactaattcagcaacatcagcacggtgaatactaccaacaattcggggatctgcggttaaaataccattacctgtaggtggttctgattttaaaccaccgggacgaataatggtatagttgagtccgctatttatcaggtgttgttctgctttttccttttcaattaatactggcttgagtgcttctaaagcttgaggaggaagcgcacctacactatcaccacaaccaatagatgttactaaaataaacttttgtactttagctttgactgcggcatcaattaaatttttattaccaataaaatctggtttgacaccatctgtaggtaaaccaccaagggtactaattacagcttggataggttcattgcctaaaagtgctttttctacatcatccacttttaaagcatctccgaatactggatgaacagcaatagcttctaattccttagcggctacttctgttctcaagagtgcttttaccttcatattgtgtgctgtcaaatatttggcgatttcttgaccaacaccacgactagctccagcgacaaaaatgtaagatgtagttgacatagtgattttcttttctcagatagatgttttggttacacaaataattaatatatcctggtttgctcaatttggtaaattcctgctataagattgtatcagccaagattttgatttactgacataaaccttcttagtgactataaatgttgctctagaaacagtaagatgttttcagagttagttagaatttatggaaatcatttaaatttgtttttatctcattttctgaaaatctgctgtaaatatcagttcctatttttcagattgttaaatttgcttaatctttatttcactaaaggttataaaattggttgaatttcttagtataacttacattaggtatgcaatagtgtgtcactatcatgcagatggattggattagtttactcaaagcgcaacaaacggacttcctgcaaagggtgaaaaaacccaagacaattgatctatctctcttggaaggtcaagtcaaaggttgtcacagtgaaattatggtattttggggcgattctttggcaaaaattctggaatgttcccgtaaacaagcggaaattctggccaaaaatccaccacccatgcctccagaataccctgaaccaccagattggacaattccctttcctaaattttttcaaagtcaagcggaagattttcttgtgcgtgaacaaattgtagatcgggtaatcatagaacgcttgggtaaattagttaaaaaagtgccacaagacactttagaaaatatggttttggatgatgagggaaatttgcgcggtgaaagtaagtttacttatattttaagtaataattcccaaatcagtgtacaagttcatgtagcggatggagaaagttttaacggcattaaaaaagataaaattcgttggacggtaacacaggaagatgtgaaaaaccaccaagtattaattttcttgtgtttgttttatccaggacatacaaagttaggatatcaaaaacaaacagtgatcactggttttttacctacaaatcaagttcaattttctgaaccaaagttgtatttacatccgagtagtttattgtatgctggtggtttaaattggtatttggaatttatcaatggcaataaaaatggcaataaatatgattcatccatcaccgatcagaaaatgatggtggaagtgattcagacgttgccttcagaacatccacaaaagcatattattggtgattgggaatgttggcaaacattaaaaggacacacgcgaggaattaactgtttagcttatgctattaaagctttaacagtgaaagatttgggtggtcataatgtgaaaactatcccaattttagctagtggtagtcgtggtgagacaaagttatgggatttatctaaaggtgagttaattgaaactttaacagaatatccttggtctgtttctggtgtggtagatgaagttaattctttagcttttagtaccgatggacaaactttagttagtgtaggtgctgattctacgattaaaatttggcatactggggcgttagatttaattgatatcctgcataaacatcaaggtagtgtgcgttgtgtggcgtttactcctgatggtaaaagtttagcaactggtggagatgatagaaaaatcttgttttggaatttgcgcgatcgcctagtagaaaatactttatgtttagatgataccgcagcccattcaatggtattaagtcaagatggcaaaattttggtgacaggtagttatcgcaaaatcaaagtttggcgtttaacatcttcatttaataatagaaatcagcaagaaattaaacctgtacatatcttaataggtcattctcacattgttaattctttggctatgagtgctaatggtaaatatttaattagtggtagtcaagataaaactgtgagagtttggaatttagtaactggggaattaatacacactcttaaaagtcatcgagaaggggtttatgcagttactttgagtcctgatgaacaaattattgctagtggtagtgctgatcaaactattaaattatggcatttggaaaccggagaattattaggaactttttctggtcatgctgatactgtcacagctttaacttttactgcatcgggtgaaatgttggttagtggaagtttagataaaactattaaaatttggcaacggagtgaaaattaggtaattggtaattggtaattggtgattggtgattggtaattggtgattagtgattggtgatttttgtcaaatttatgttattaatgcagaagtgttgaatgttaagaaatctgtgataaaaatagcccaaaatatattaaaatttgagcaagctatatcaaaatattgatttgatcatgattataaattcatttcccaagattgtcaaagaca

SEQ ID NO: 83 - DNA, 20951 bp, Sphaerospermopsis sp. LEGE 00249
  LEGE00249_101
ggcaggggaagatgaataaaccaatgcccaatgcccaatgccccatgactaatggccaaaaaactttttcttgggatgaaaaggaatattgagagagttatgaaaatcttcttgaactttatgagttaaacgacgagagacttgacggacaatttgatgcagtaggcgatcgcctgtagactgaatcaaagcatggggtaaacggtgaataaatctgggaaaatgcagatcaacaatcaactctaactgccattctaccctagtcatccccggcaaactttctactaattccaaagacgcattatagtatacatcataaccaggggcttggtagttagggataggaattgtacggatgtggtatttacgttcctgtgttgctaacaattccaaacctatttttggttctacctcatagccaaaagcaccaaagcgcccaatcaccaaagcataaccattcttacccaaaggttcaaccctcataggttcagcgcaacgcacaaaccatgaagaatgggaattgagatattcagcaacctgttcttgagaagcatacatttccatgcagtcttgatgacggctatggaatttactaggacctgcatgagtgtctttggctggtgtttcatctgaggttacgcttgaacccgctggtaaaactgattcagttatttccaaggtttgaaattcccagttgtttgctaccataaatgcgttttctgtatacttaaaaagtttgtctataccaatgattcccaatcagggagagtttgttcacacaaaaatacaaatttcatcaaaacatcaaaaagtctgttatcacctccatagaatcactacaattaagaacgaaaacagcacatattagtttctcaggatagcgtaaatcatgaaagcatttgtagcaggtgcaacaggtgaaaccggtcgccgcattgtacaagagttagtagccagaaatattcccgttcgtgctttggtacgggatcaccaaaaagctaaagctatcctatctcctgaagttgagttagttgtgggggatgtgttatcaccagaaaccctaactgctgccataggtgatagtacggtagtcctgtgcgctactggtgcaagacccagttttgatcctacaggaccctatcaagtagattttcaaggtacaaaaaatttagtgaatgcggctaaatcccagcaaattgagcattttatcctggtttcttctttgtgtgtttcccagttttttcatccgctaaacttgttttggttaattttagcctggaaaaaacaagctgaggaatacatacagaaaagtggactcacttatacaattgtcagacctggagggctgaaaaacgaagataacaccgatgggatagttatgcaaggcgctgatactttatttgatggtagcatcccccggcaaaaagtggctcaggtttgtgtcgagtctttgtttgaaaatgctgcacataataaaattgtcgagattgtcgctaaacctgaagttacccctaaaagcttccaggaattatttcaaggagttctgaataggtaattagtaatgggtagaaaataataattgaatcgaattataacccatgcccaatgccccatgccccatgccccatgcccaaagcaaatgactattaaattcaaaggtgtagaaaaattaattggtccgattgcatcacttctggcttttgtgtatctttttcaatggtacatttttggcgatttgcaatcaaaaatagatcccatatttgagcgaaaaaatccgcctttggtgatgaaagacggagatccttacatccgtgctttgatgcggacgatttcttttagtgagtctaatactccacgtccttattctgtgttatatggtggtaaacaggtgaatgatttgagtcgtcatccacagatatgtgtaaccattgtcaatggtcccaatcaaggaaattgttctactgctgcgggtagatatcaaattattaatactacttggtatgacattgcgccccgttatcatcctcatcccccagggttgagattttggcatagttatagttttgacgctgaatatcaagatgtagtcgtttatcgctggttgagtgattctcaagtatggggagttgatatttctcaactgctgcgagaaggaaaattaaatgatgttttacggcgactttctcccacgtggacaagtttaggatatgggatagaaactaattctaatactcgttttttgcctcaagtttatcaaaaggttttacaagaagaattagcactggctaataaaccaacagtgaataatcctcaagcattaccagcaccaccatcatcaaattctttgccagattcacaacaaatcagatgatgttagattttaaaattgtattaaaattgtattaagattgtagtttagttttctaacaaaaattttcccagatgatccacaaaatcccgtgtattttctaagtgaatattatgtccagctttgggaatgacttgcagttgagttactaatgaatttctgtaatacattgctgtattaatatggacaaatttttcatcatattcacctactaataaaagtaaaggaatttgatttgcttctagtttctcccacaaagaaggttggtatccattacccataaattgcaaagatttggcaagtgctaaaggattattttctaacctactttctatcatcttttgatatactggatgatttttgatattaccaaaaattggctgattataccaattgtgtaaaaaaacctgaaattccgatttatcaatcatcctaattaattttcgggtaatttgataatcacctttaatcctggataatctttctgcatctgttggtaaaccaggagaagcagattctaatacaactttgataaatctttctggaaaatgtaaagtgagatataatcctaatcttcctcccattgaataaccaactaaaaaacattgtgctatttttaattcatctaataagttgatgatagcttgggcagtattttctattttataacattcatcaccgcataaaacttttgttttaccatgtcctggcaaatccagggtaagataagaaaaatcatcacctaatagttgaatcgcttcatcaaattcataaatatttcccataaacccgtgtaaaaacagaattactggtttaagagagtttttattaaaggaatagtgaaaatgatagtttttattcaaaggggttatttgtggagtttgcattgattttaagtatgtcatttcccagaaagtttaccatgatgacaaacctatttaggggttgctgagaaagtctttccgtgagggcataggagtcaggagtcgtaggggcgaagcattcggacgacaaattatcaattttataaaaaggctattttccgaatgcttcgcccgtacaggagtcaggaggagatttgaaaatttctttgccatctcttgaaatccccaaaaatgcacactttttccggtatacccttcaaaacccttgcactaatttctgtgtttatcagcctctaacctttgatatatcaaggttttaggtttattcagcaaaccctatttaactctaggtaaaagctgattactgattactgatagctgaatacttacctaatttttcacaacttctcgccttctaggtatgtcataaatcataaaatcatgcgccatgatagtattaggaaaaatcgcacgggcttccttcaacaaatcttttaactcaatggcattaccaggagtataacgaggactaaaatgagtcataattaattgattcaccctggacaaataagctgtttgtgctgccattgtgctggtagaatgtaatctttgaaaagccatatctgcatcttgatgggcaaaggtagcttcatgaattaatacatctgcatcttgggctaatttgacagcaccatcacaataaacagtatctgtacaataggcaaacttgcgaccaatttccgtaggtccacataattcactaccattaattactcttccatcttccaaggtaacggtttcaccgcgtttgagttttccataaataggaccagaaggaatttgtaaagctttagctttttccacatcaaagcgtccagttctgtctttttcctctacacgataaccaaaagctgtaatgcggtgatgtaacaaaccacagctaacaataaattcatcatcttcgtaaattacccctggttgaacagtatgtactttgatggggtaagaaaaatgggtgtgtgagtaacgtgaggcgctttgcagatattcatttaacccagcaggaccgtagatatcaattctatctacatttccagctaaaccacaactggctaaaagtcccatcaagccaaaaatatgatctccgtggagatgggtgataaaaattcgggagagttggctaattttcagatcactccgcaaaatttgatgctgtgtaccttcaccacagtcaaacaaccatagttctgcccgttgtggtaatctcagtgccacactggaaacattacgtgatcttgtaggtacaccggaacttgttcctaaaaatgttatctgcacagcgttttctagccttcctctaactcaaaatgaggatttatttataataactcacaagataaccaggccaagataactcacaaatagttccttgaggatacatgggaaggcgttgaaatttacctttaatttgtcgggctaaatttttaaactgttttgttccctgaccttccctcttaaatgagttaacagatgagttaacgcctaaaccgtcatctacaatacttagtgtgtgccaacccatagaaaaagaacaagtaactttgagacaagttgctcctgtagcatatttacccacattacacaaagcttcttctaaaaatcggcaaattcctcgtttgtcttcaatagttaaactgtgttcgtctataggttcaaaattacgaatttttaatttgatggttctaaagcaaggaaaatctctttctaaggtgtgactataaacttgatagagaatttcgtgcaggggttcttgtaaattgataattatactgtttcctaagtaaaggtttgttttttgatgtgtgaggctttcctgttgccaaaattcataaattccccttaattcttggtttaaattttctaggtctttttctaactccggtagcattttcttaattgataaatcttgtaatttcaccaatcttaaaaccctattaagagtttgtagtggtccgttatggatggtttcaaatgcaacttcaatcatcgcttttctagctttaattcccgatttaacgatttggctatagtgatatatacctgtgatagctatagcatttaaagctaagactataattgcagaaaattttggaattaagcaaccccaagttaatagtacataactggcactgactaagttagagatgacaatactaatcactatcatatttgtgactggatatgtgtttaacatccacatattttgccatcctgatttcattttcatccaaaatttagactgcataagctttcaatattaattgacaattgacaattgacaattgaaaattgacagaattgaaatggttatttgttagtattcagctatcagtaatcagtaatcattaatcattaatcattaatcaatcaacccttctgatctcgctttattttctgtttgaatgcggatatttttaccttcctctgggtaaacgtttaaagcatcttgtaacttactccaataatgacgcaccatgcgttcagatacacacatttcttcagcaattgctttatcttgtaatccttcttgaaaagccaaatttaggacttttaaccattcgggttttacttctaatcctgagtaaattcctttgatatcttttgtatgagttaatccttgtaatgcccaatctactcttgttaacatttcctgggttgaaaggcttttatcagcaatagtaaaacctcctttgtgactatcaatatccaaacgaatacgtaccaatgtccttgcatgggcgctttggacaacaatatttaagtgaggatatttttgcatcaaaattttcaatagttgaataccgttgtcaggtcgcgcagtcagtcctttttcttcgggaattgaaagatccataactatcaaatcagtctgaaaactggtaagttgttcaagagtattattgacattaattgcggttataaattcagcactaggatagttttttttgagaatgtcaattgttccacttaaaactgattcatgatcatcaattaccaaaattttcagcaatttatttgctgataaaatttgttccatcttcaatactgaataataattagcttttcctaaattgtatttatgttggtttagttgctatgagggatgtcacccttaccccggagaattttactgaattaatataattattttggtgaaaatatttgctagaacaccgagggcgaagcattctgatagaatatgaactggtttcagcgataggttattacccgaatgcttcgcccctacaaggtaaaaacaaataaaacctaccaacaaaaataccaagctatcctatgattgctactattgtaaaagcattgcccagacattaaaaattctaggctatcactgagataatttaattccggtagataggagtaagacgttaggttagatagatcagaataggtgattctgacagttaattttttagtattttctttgagttgtaaactgatataaattgcaataggtgtgaaattttctcgcaaagttattcttaataattcctctaaagctcgtagaattatgagactaccttctacagactcatgttgccaatatgctggcatatcaatatggaaatagatatgagtattagataagacccaaggttctaacaagcattggattgagagtggtaaactctcttgaatatacactggacacaggcgatcgctcaactgaactaaagagtgatgaaaattatcaatttttttggtgtgttcatagcaattctgaattaataaattgggatgatctatttttaatacatctaaactgcgacgaatggtgaaagtttcttgtaacaaactgtcccgaattttttctgcttccccaaacagttttatggattgtctataagaccaccactgtaatgcttcttgaatgctttgttcataggtcataaacttgataattgttatgccttgagtgtcagtaatatcagtaatagatattgataccaattcataattgaaaattcagaaatgcagattatatgtagggtttttggttgtaatctgttgcctaattttaatgaattggtatgaggaatttggatgaaatattacaattcatcctctgtcagatggttttttagtcattgttttttagtctggtcttaattgtaactatttataagtcagtaattagtcttgcttttctcaacataaattgtaatgctgtttcttctctggaaataatgtcagcttttacttccattcctgcttggatatgacattggcgaatagtattaccaaattcaagagtttctggttgaattgttgcttcaaaaaaactcaaattattagatgaggctataccttgatttttattttgggttgtaatgacatctggggaaatgttgttgaccacaccgttaagtgtgccataatcaggatatggacaagcatctacacgcaattggactttttgaccaacggcaacttttttaatttcatttttaggaatcatagctttaatgactaatgcagcataatcaggaacaatttctgcaatagattcactagcacgcactacttgacctgggttacgtaaatttagcttgaggataataccattgctagtggcaaaaatactgcttttgcgaatctgattttccagttgttccagttctttttgtgattgattaatttgggcttgtaattgcacgcgacgctcaagtaatgcttgtttctctttatttaaactagcaatattagcttcacctttagcagtttcttgggcaatacgttcttgtgccatcatcactgttgcgggagttggatttactgctgctttagctgattggagtttgattttagctatttcaaatgacttttgttcagcttgtagtcttaattgtgtttgttgcacaactaattgtttttgttccaattctcgtctcccaattgcgccaatttttgataattgctcatagcgatcgcggtctaatttcgcaaattctaaatcagcttgagctttttgtaaatcggttttagccttttgcaaacttgcctctgaagctagaaattcactgttagtattaacttttcgttcttgatattcccgttggttgcgggctaaatctacttttgcagtagcaataacagtttcgatcacttttttttctgcggacatctgattatctaaattctgaatttgtgcatctatttgaattagttgtaaaccaccttgttgaatattaccttgcagttgactttttttaattagtaattgttcattatccaaattagcaattacatctcctattttcacaggttgattttctttgactaaaatggttttaactgttccttccatttgtggttgtactagacgaacttcacccgtaggacgcacagtaccaactgttttgactgtaacattatatttaatccatgaagagagagcaatcccactagcaacagtgctaattagaaatattcctgctaaagaagtccaacgactaataggaggaagaagctcatcattttctcctgaagagatcaatttttgattatgagtgtagagcataagtacctgataatttaattatgttgaattaaggattatgttgaattagggattatgttgaattagggaattaaaaaatctaaatgttcgcctgtttttacctttaaatcctgcaaagaaccatgtatttttaatcttccctgatctagtaaaacaacccaatcagcacgattaattaccttgggacgatgactaattaaaattgttgttttaccctggcgatgtgcaaataattgatctaaaacttgcccttcactgacaggatcaagtccacctgtagattcatctaaaattaaaattggtggacttgtgacaatagctctagctatggctaatctttgacgttgaccaccggaaatatttgcaccaaattcacctaaaatagtttgatatttttccggtaatttactgataaattcatcagcaccggcaatttggcaagctctgacaatttgctcaaatgtcacgtagggcgctcctaaacggaagttttccacaatagaacgactccaaaaatgggcatcttggggaacaagtaccacctgttgacggagactgtctaaagaaaggtcttggaggttataaagtccaatgcggatattgcctgactggagaggatataaaccagcaagtagtttagcaagggtacttttaccacatccagatttaccaattaaagccacaactttaccaccgggaatggttaaggaaaaatcttctaaaaggtcaattctacctgcataatgaaagttgatatttgtacaaattatgtcagcatcaccaggaatatttgcaaatggttttctgtcgtcattttcattttctggagtagcatcaataacttctgtcaatctttgtacggctgttttggcacgggtaaattcttcaacaaaactgatgacagtagctattagacctagaaaattaccattcattgaattaaaggctaatagctgcccaatacttaggttttcatctgggttaatgactaaattaccgccaaaccagagcaaaactataccgccaattgcagaaataaaggtagaaaatgtattattaataatgccaatttgcattgtgcgtaatgtcaaagtggcaagcttactaaatcgagattgaaattcttcggaaaattgggaaccagcggcggtagttttgagagttaatgcacctttaaaactttctactaaaacaccttgtacttcggcatctttaactaatagttcacgggtcttttgttgtaatgtaggctggaagattaatggagctatggtcattaaagcagcaatacagatagctactaaagttagtttccagctataaaaagccatgaaaccaaaggaaattaaggcgataaaaaatttgctcggtagactgacaacgacttgagtaactaattgattaatttgcttaatatcttgcagacgactaacgatttctccactacgacgagcttcatagtaagcaagtggtaagcgtaatatttgtctgccaaattctaggactaatcctaattgtagacgttgagcaaagtgagcaattaaattagactgaacccaagaaagactactagaaattaggttcattactactacagcgatcgccatagtagtcagtagtttagtatctccacgcactaaaacatcatcggtgagaatttgtaataggaaaggagacgctaaagataataatcctaaaagcaagttgagaggtaaagcttgagctaaaatagcgcgaaaattccacacgcgcttgaagaaacgccaaaaaccaccaatttgatcatcttctgctttgaaaaattcttctggatcgggttctaataacagcattaaccaatctgtccaaccctctactaaatctttttcagatagatagcggacacctactgctggatcagatatgataaattttctgccttttttaccatagaatactacccaatgattaccttgccaatgaacaattgcaggtaaaggtgcttcatttaatctgtttaaaagttcgggagaagttttgactggtgaagcattgaaacctagtgtttttgctccccgttgtagtcctaataaagttgtaccaaattgtcctgtgcctacagcttctctgatgcgactgagagtaaaactcttgccataatatttggcgatcgctgccaagcaagctgcaccacaatcttcttgactatgttgggaaacgtgagtgtatttcataaagaaagaccctgatttctattgacattacaactaattaatcacgatgcacatcttgtttaacaaagaaaaatattatgaattataagtagttttttcgccaataaaagttatataaatatcctacctaaattagtaatatagtaatatatttacaattcaggtaggcaataaactccttgagttgatatagagaaatagttaattgattaactacctaaaattctgttatttgttgagtagggacaggtaagcctagagttcttaatatctcagacccactaggaggattggttttatacaaaatctcaccgtctaagctttccatgataaaactgtaatctgtgggattaaaacttaacagccaatttcctccactaacagcagcagattcttcaggagtcataagtgtaaaaatccattttttgttaatcattttcattgctcctttttgaaataatttgcggacatcttaattctttgagtagttattgaattaaactctgggataatatatttccctacagttaactaatttatagaaaagattacagcttttctgattacagctatataagcagaatgacatcaaaaaaaccaggaaaacaatctactgattgaaaaagaattagtaaaaaaattgagtgaaggttcaggattaataaggatattccagccatagtgtatttcttcattagttaatatcacacctcctggagaagctggggtttgagctaatagcatataaatcagatagccaattgctccccccccgctaacagtagaagcttcttcatcggttatttctgtaaaaattggatttttgttggttgtcttcatttgctgatcggagcttgtagtcaagatagtatagcaagttgggtgaatagttcgtaatctttgattactcgcatggttcaatactccttgatcttgcttaattttgattgaagttaggaaacgtggattaaaccaaatataaaacttctgtttggtagttccttaggctgtaactaacccaacgaatctcaggaagtttttggttattaaatccacgttcctaaaggttataaccttgctctgtctattttcattagaggactaataaacgccgctactttcaatgataaaagttgctttttttgcctcattcaatgaaaatatactgaacacaaagaaccgttagatcactacaagaaacctaaacctgcgggagcaacagcttcaccttcgctgatgaggatattccacccaaatagtatttctcctgatgtaagtgaagttcctcctggtgaagcaggagttgatgctaattgcatataggtaagataagcctcagcttcaggggtaggagtaaaaatttgaccgccactagcaatagaagactcgtcagcagcaacttgagtgaataattcgttattgttgattacttgcatggttcaatactccttgatcttgattgattagatttgctttaagctagaagttgattgcttttttgtaagcccctcaaccgcttgcttgttaatacaatatcgagaacaaacccttgaagtcatgctcaatttctgcaaacttaatttccaaatttagaaatccatatttccgaaaaatacacgcgccaattacaattaatcgtgcaaaaataatcaacataaaaattccctattctcaactttattaaatgcttcactacccagccaactcctaaatactctatatatttaaccaattcccgtatctgaacagtatatgtttactatttagcccaaaaatgtactgataaataaaaattaatcatgcacaaatatcacaatacaaaaatattatttctaccatctcacaagcaaaatcagctatttctgtaatcaccgaagtattgccatcaacaaagtataaaacttttgccaaaatggcacagattttttatcaaaaatcagcagatgcgtgttaaggttttatttccttaccccatttcttcttttagtgcctctgcccatgttagattatttacacccccagcaccttgaagaattagtccaaaatagctgtattgatttacacttaacccgtctaaattttatatcgctccaaggtacgatcgcctatcagtacctacttatatcggaacaaataccacgcaccaatactggcatggtaaaaagttcgtggttgcagcgttacagccatattacagcaggtggttggtggtgttctggaagagatccactgaataattggcataagatggaatggggatgttttaaaccatcccaaccccgacaaaacaaaaaaggcaagtctattaaatatgaacatcctcccagcacaccaacacgggtattttgtttgcgggtgacattgaaaatttggcagcaagttgcccagcgttacaatatggatatgcctgacaatatcaccattgctgatgatggtgaagcggaaggtttttggcaatgggtgatggaatgtaatatctccataattatttgtgaaggtgcgaaaaaagccgcagctttattaacacaaggctatgttgctattgctattcctggtattactagcggttatcgcgttgttaaagataacttaggtcaagttacccgtcgtcaactcatacctgacttagcaattttcgccaccaaaaaacgcaatttttatatatgttttgattttgaaactcaaacaaataaaatcgccgctgtcaataatgctatttcccaactcggttgtttatttcaacaacaaaattctccggtgaaagttgtggaactaccaggaacggaaaaaggcgttgatgaatttattgctgctaaaggtgcagctaattttgataaagtttatcgtcaaagtgtagatttagaaatttatctagctcaaactaaacctcacactgagttaacaatttcttctgcactgaatgttaacctggcttatttaggagaaataccttttccctcttctggtttagtaggagtaaaatccgctaaaggaactggaaaaactaccggactggaagctattgttaatcaagccaaaagtcgtaatcaacccgttttattaattactcatcgcattcttttaggaaaatttttatgtgaaaaaataggcattaaatggggaattaaccatgaatcttggagtatagaagaacatccccaactaccaattaccaaatcttttggtttatgcgttgattccctttggaaattgcatcctcaagattggcaaggggctatagtaatattagacgaagttgagcaatctttatggcatttactaaatagtaatacttgtaaaaataaacgtgtgaaaattctgggagtcttccaacaattaattgctacagttatcaaaactggaggtttaataattgcccaagatgctgatttatcagatgtttctctagaatatttacaaggtttagcaggaactaaaattactccttgggtagttgtcaataaatggaaaccccaaaaaggttgggatgtaactttttatgattcacctaacccaactccattaattcatcaattagaattagatttaattgccggacgtaaatgttatgtaactacggatagtcgcacggggcgttatagttgtgaaaccattgaaggttatcttaaagaacgtttgcagaagttgagaaagcaatttcctgatactttggtggttagcagtcaaacgactaatactcctggccatgcagcatctgatttcatagctgctattaatcaaaaaattactgattatgatacggtttttgttactcctagtttgggaacaggaattagtattgatgtgcaacattttgaccgagtttatggtatttttcaaggggtaattcctgacgcggaagcacgtcaagcattagcaagagtacgtgatgatgttccccgtgttgtctggtgtgctaaacgcggtatcggtttaattggcagtggtagcaccaattatcaattactatctcattggtatcaagaaaaccaaaaagaaaatctcgccttgcttagtcctttacataaaatagatgtagatttaccagcagtttatgatccaattcatttaagaacttgggcaaaattatctgctagggtaaatgcttctattcgtctttatcgtcaatctttacaagatggattaatagctgacggacataaaattattatgcggagtaatgctgtacaaaataatattctgcgggatttacgtttggctttttttgctactgatgccagggatgtagaaaatcgtaaaagattaatcatggaaattgttaaagtccaaaaagattgggcgcaaagtcgtcaaaaagctaaagatattaaacgtaaaattaaggaaattaaacaagaaaatcaattaatagctgccaatgctgtggctaaagctaaggaaattgattatgttgaatatgaacagttattagctaaacattctctcagtgacgaagaacgtaatcaaattaataaatatattctcagagataggtatggtgtggaagtaactccttggttaaaattgcaggatgataaaggatattatggacagttgttaattcattattatctcactcatgaaagtgaatattttcatggtagagatcaggaagagtggcaaaaacaattatcttggggtgagggtaaggttttcttacctgatatcaagacttatactctcaaggttgaagctatgagagcattaggtatgttacaattcctggaatcaggaagagtatttagtgaaaatgatagtgatattatttggttaaaaaatgttgctattcacagtagtaaacatattaaacgagctttgggtattgatgtggtgaaagaaaaaaaatctgtttcaggaattacgatacttaatcgacttttaagtttattgggtttgaagttgcaacaggcaaataatgttgataaaggggttgataaagtttataaagtttataaagtttataaaattgatatagcaactcttaatgatgggagagataaaatctttgcagtttggcagcaacgtgatgagttgaggttgcatcatttacatggtgtgaatatacatggtgtgaatacggaaattagagattattctttaaattctcagtttgtggtacaggaagtaatgtaatttatatgtaggggttgctgagaaagtctttccttgagggcataggagtcaggagtcaggagtcaggagtcaggaggagatttgaaaatttctttgccatctcttgaaatccaaaaaaatgcacactttttcctgtatacccttcaaaacccttgcactaatttctgtgtttattcagcctctaacctttgatatatcaaggttttaggtttattcagcaaaccctatgtaaggagtcaggagtcgtaggggcgaagcattgggaaaataaccttttcataaaattgataatttatcgcccgaatgcttcgcccttacaggaaaatagccttttcataaaattgtcaaacaacctctcaagaataactcgaaaactctcatttattctgtatcctgtattctgtatcctgaatcctgacacttgtatttttagagaaagttaaagatagaaaaattacatgaatgctgaagagttgattaaacagggaatacagaagaatttacagggtgattatgaaggtgcgatcgcattgtttaatcacgcattacagttaaatcccaatttagctgaagcttatcataaccgtggtcatgcctatttacaactagagacatttgaacaagcgatcgcagattatcaacaagtcctaaacatcatccaaaattctttccccttaccgcaaaatattcctcaaaatattcaaaatattattcaaaacatcaattttgatatagctaaagcatttcataaccaaggtttagctcgttttagaaacggagatgatcaagctgccattgcagatatcaaccaggctttacaatactctcctgattttgttgccgcttacagtaatcgtggtaatattctgcatattcttggtaattacaaagaagcaattgctgattataaccaagcaataaagttaaatcccaacctagcagcagcttatcataaccgtggtaatagtcggtatgctctccaagactatcaaggtgcaattacagattataatcaggcattagaaattaattcccactttgctgaagcttattataatcgtggtttagtaatgtctcacctggaagactatgaacaagccatatctgattttagtcaagcaataaaactccatcctgatgatgatcaagcctattatcaacgaggtttagtttatagcaatttaggaaactatgaaaaagcaattgcagattataatcaggcattgcaaattaaccctatcctctccatagtttatggcttgcgggctaatgcacgttaccatttaggagactatgaaggagcaattgccgacagcaacatactactacaacttaaccctcaactagcagaaaaaattagtaatgggtaattgatgattggtgattcaatataaaagttttggacatatttgcttttccctattccctattccctattccctatttcctattccctgccccaacagatatcgtaagtgttacaccggacatgatataatttttcaactctttctatttagggtttgctgaataaacctaaaaccttgatatatcaaaggttagaggctgataaacacagaaattagtgcaagggttttgaagggtataccggaaaaagtgtgcattttttgggatttcaagagatggcaaagaaattttcaaatctcctcctgactcctgactcctgtacgggcgaagcattcggaaaatagccttttcataaaattgataatttgtcgtccgaatgcttcgcccctacgactcctgactcctgactcctatgccctcacggaaagactttctcagcaacccctatttatatatgtcttgggaaagtagacaaaatcatcatttaaaagccctaaatagtaatagtgtttaaccaaaaacctttctaagttttctggttgtgtacgtgagaaaaaaatatgactacaaccttattacaacccaattccttggaatcattgctaggtaaagaagcagaggatttgctaacatataaagccaaggtttcttcagatttgctgcatttaccaggagcagattttatagatcgagtttggatcaatagcgatcgctctccccgtgtggtaagaaatttacaacaaatctattctaccggacgtttagcaaatacaggctatctttctatcctccctgtggaccaaggtattgaacactcagcagggtctgcttttgcacctaatccaatttattttgatcccgaaaatattgtgaaattagcaatagaagcaggttgtaatgctgtggctacaactttaggtgtattaggcagtgtgtcccgcaaatatgcccataaaatcccctttattgccaaaataaatcataatcaattgttgacttatcctaatcaatttgaccaaattatgtttgcagacgtttggcaagcttggcatttgggagcaaccgcagtcggggcaacaatttattttggttcaccagagtctgatagacaaattcaagaagtaagtcaagcttttaaacacgcccatgaattgggtatggcaactgtgctttggtgttatttgcgaaatagcaattttcaacaagatcaagattatcacttagctgctgatttaactggacaagcgaatcatttgggtgtcaccattgaagcagatatcattaaacaaaaattaccagaatgcaatcatggttatgaagcaattgctaaagctacaggtaaaagttacggtaaaactgatgagcgagtttacacagaattaaccacaaaacaccccatagatttaactcgttatcaagtattaaattgttatgctggcagggtaggattaattaattctggaggtacttctggtaaaaatgattttgctgaagcggtacgaactgctgtaattaataaacgtgctggtggtacaggattaatttctggcagaaagacttttcagcgtccgtttgaggaaggggtgcgcttatttcacgctattcaagatgtttatttatcacatcaggtaactatagcttgattttgcagcttgattttgcagcttggttttgttttgttgcaaatacctgatgtatgaaatgattttttgataccgcagcatggtgtaagccatcaaagtctcatcatggggataggaaacctgtaggggtttagcattgctaaacccctactgctgtatttacattactttttatatacattttatatacattttatatacattttatatacatttaactaacccctaaaacgaacttttggcgcacaggattatgaaaagagtgaaattgaacaggagttaatcagaaataaagctgcaagaggagattattaagtaggggttgctgagaaagtctttccgtgagggcataggagtcaggagtcaggagtcaggagtcaggaggagatttgaaaatttctttgccatctcttgaaatcccaaaaaatgcacactttttccggtatacccttcaaaacccttggactaatttctgtgtttatcagcctctaacctttgatatatcaaggttttaggtttattcagcaaaccctaagtaaaaattgacaattgaccattgacaattgtttcatttaaggtttaaaacctcccctttccaggggaaaaagcaaaaaattccgcagaataggctgcttgccttctgcgtcctgcctgatcataacgacaatttttaacgcttacctacttatcctgttgaatatggctgtgtaaacccacaagagtttccgctaattggtttaaacgagtttccagagattgtttacgtccaaaaagctgacgtaatttttggtaacgggcaatagccatactgacttgaggaacttgatcaactggacattgacgcgaccaggctttaccagtagcatcaattccacaaaggcggtagccagtacgggatgattgataacaagcattctcttttgactcgcaaatctcttgcacataatccattagtcgttcaacttccccatgacgcagggttgcagttccccctggttctggttcttggggattcgactctaaccagccattaatcactggaccttctaaataaatatcctgaatttgctggagaattgattgtaattctgtttgccatcctgctacaatctcttgaatctcttgtaaaagattcatcgctaatgctggatttgcaccgtgacgatggttactaaagctcggtgttttaaacttgggtaagctaggtgttttgacttcagtttcttgggttgggaaagtttgtacggaattatgtttagaaaataaatgtggttgtgattggggattggtttctttattggtatttatatcaactgtgttaatgtcttgattggctgaattttctttaacttcttggctttttttagctccgatgctaattctaaaggagaatgggcgttttgtcccatcactggtttctggtggtaagtcggtactacgtatccctaaatcatgtaaagttgcctcaatgcgttttaaacctggtttcataaacagatcctaaagcttcttgtgctgccgatactttttaactattatcatatcttgcaccatcatcctatgtgaaaatctaagtctacaaccgttgtatttttattggcaattaatataattaattaggggttgctgagaaagtctttccgtgagggcataggagtcaggagtcaggagtcaggagtcaggagtcaggagtcaggagtcaggaggagatttgaaaatttctttgccatctcttgaaatccc

SEQ ID NO: 84 - DNA, 20699 bp, Sphaerospermopsis sp. LEGE 00249
  LEGE00249_102
ctgctccccctgtccccagtcccctatactggtgacaataccttgagtttctcttctaaagagttcattagggactggaagggttgaacaaacttatcaataccctctacaagtagttctgacatcactgcttcaatattgatgttgatgtcaggatcttttaagctttcgatgaggttatgagcttctgcaactcctgtttctaaactgtcgctcacatgacaatgatcagcacaggctttaatagtcccaggtggtagagtgtttacggtgtcatgtccgattaattcattaacatacatgacatcgctataactggagtctttggtgctggtacttgcccagaggagacgttgcacctttgcccctttagctgctaatgcttgccacctatcactggcaattatattttgatattcttgataggcgatttttgcattagcgatcgcaatttttcctctgactgccctcaatcttgcttcgtggttaatatcatcaacgcctttctgcaatttagcatcaatcttagcatcaatgttggtatcaatccgactcaagaaaaagctggctacggaagcaattttactaatgtcctgaccttcatttacccgtttttctaaaccccgaatataagcccaagctgcattgacatagcttgctactgcaaataacagggtaatgttaacgttaattcctgcggctattgtcgcctctacagcaggtaaaccagcattagttcccggaattttaatcatcacattttcccgcccaatttcttggcaatagcgacgggcttcatttattgtagcttgggtatcatgggcaatggtgggaggaacttcaatactcacataaccatcaagtcccttagtggcatcatacacagggcgcagaatatcacaagcattgcggatatctgcgaaaaccagagattcataaattttgtatgtgggtaaaccagcacgcatccccgcttcaatgtcagcatcataaatgccattcccagtaattgctttttcaaaaatggctgggttggaggtaataccagagattccttgattttctactaggttttgcagttcccctgattcaataatgtcacggcttaaattatccatccagatgctttgtccgtggtttttgatctctaataaatgattggttgccataactattttttaactcctattaacattgttttttgtgaagttgagaagtttactcatcctaatttcttgatggagaaacgccaatttttatgaatgaaccgcaaagtacgcaaagtacacgaaggaagagggaagaaaagagggagaaaagaagttatcaatcaaataattcggcgtttcttgaccaggaaatggtttaattgagtgtatttttcacttcacatccaaacattgctagtcctacattccaatcccaatgtgccaatgtttagcttcgattactggccatactaaatgcttttactggattttgcctactgacctttttgcataaatgactcgactttggctacatcctgttgactaccaataattaacggtgtccgttggtgtagtttggttggtactacatctaaaatatcctttgttccagtagtagcgcgacctccagcttgttctatcaaatatgctaaaggtgcagtttcataaagtagtcgtagtttcccttcgggtttttgtaatgtacccggatagagaaatacaccaccttgtactaaaattcggtgaatatcgctgaccatcgccccactataacgggcagtataaccttctgtccgatgcacataacgaatatactctctaaaggattcttcccactgccagaaatttccttcattaacactataaacagcaccatgttcaggaattttcacgttttcttctgtgagaataaattctcctaaactgggatcaagggtaaagaaatgtacacctttaccaatactgtaaaccagcatggtacttggtccataaagaatataacctgctgctagttgtttccgtccatgatttaataagtctttagcttcaccatctaagtctgttccttcttgttgacggatggaaaaaattgaacctaaactgaggttaatatctgtgttagatgaaccatcaatgggatcatataatagggtataacgtccaatagggcagttttcggggatgtaataaggtttttccatttcttccgaagccaagcgacaaactaagccactttgcttaaatacggaaataaacacttcatttgcatagacatccatttttttcacagattcaccttggacattcacttcccctgtgaaacccagaacatcttccattaaacctgcacgggtaaaccgtctggcaatcagtttaccagctaaggcgatgcgattcattaacgcactcaaatcctgtgcttctggtccaaaactctggagttgttggaggacatgacgggataaggttgtacaatctcggtctaaggttttatcactggataaatctaacgtttctgctacttgagtcattttggttacttcctgggattttgctatgaggccatgtttatctatagtggtttttagctgctatctctatcttagaaaggtatttggataacttaaatgtgattttagataaactaaagaattgatattctcgttcctatactctgtatggggatcaattatggaaggctctgcgttcaatgaagatagagggagcaagtcctaagttgacaatttcatagacaaaactatacttgtattgacaaaaatcaatatatttttaggaaaaaatcaactacttgatatataatacggtgatatcaagtattgaattgagactattgccgacgcgaaaaccaagcaatgatggtggtagtctttttcagaaacttaattggaacacaatcgcgtctggctaaggcgtgaaagtctactgagggataactgctcccatgctcccgttgaagtagaaagtaaagtctagttttgtctaggttttatatagcagaacctcgataatggcattcccagtctgagactgggaacgagataacccacaaatccaaatttttcaagtttctgctactactggtgtgggttggggtgagtggtatgggtggttaagtaaaaatgtgaataattcagttgatttgatatctgtgtaaattcaggaaaaaatacctaactatttacaaaattaggtattttttcttatttactttttaagtaaaagtgctatattaaattctgcactgtttcgacaaactgatacacaaacaaaagctgagaaattcagcaaaaaagtttcagaatatgcaacttcaaaagaggtgatatattctttaagcaaggaaattggtgaacctaaagaaactgaaaccgaagaagagtttatagaaagagcaagtaatgtacttagaaacttgttaaagaaaaaatttaatgtttagatatagaatagcattttaaaagttttaaccaagttctctgagactgaaagcgatcgcccaaagcttcctgtctaaatgttttgtcacgatattagatccccgacttctttttttatcttgtcagtaaatgataaattaattggagaagtctgggatctgggcgtgattttaggttacaatagaagcattaattttaataaataacgttatgggaattaaagaagtattactaccatttcgtgaggaaatattcaaaattgctgctaaatatggagcttataatctacggatttttggttcagttgctagaggtgaagcaacaccagatagtgatgtagattttttggtggaactagaaccacatcgcagtttattcgattatatcgctttaaatcaagatttggcagcattattaggacgtaaagtagatattgctgaacctgaaaatttacatgatttaattagagataaagtattaagtgaagctgtaccattatgaaagatgaacgtttatatttaagtaatattaaagaatgtattgaacggatagaagaatatactcaaggtggaaaagaagaatttatgcaaaccaagatgattcaagatgctgtgattcgcaattttgaaatcattggggaagcgacaaaaagattatcacctgaattaagaagtcaatattctgatattccttggcaacaaatggcaggtttacgagatgtattaattcatgattatttaaaggtgaatttgaatttggtttggcaaattattgagcaaaatttatctgatttaaaattacaagttacacagatattacaaaatttaggtgatgctcgttaaatgtcttcaataaagatagaggcagagcctctataagaccattcccagtctgagactgggaacgagacaacaaaacaacctaaaatagaaataagagtattcagataaaataacatcctgaaaatcctttaatcctggaaatcctgattcagacagtttctacggtaaataatctggattaagaacatccgtaacagagaaaggagggttttcaggaaataaattaggagataattgatatcttttcagaatatattgcctagctttttgataacattcttcaaaaatatcatccagcatatttcttaaactcggactatcttccagagttaattctatttgtaatctttgttccgcaactgtattacgccatcctctagcattattttctttttctaactgccaatattccagttttaatatatgctcaattaaagttattaaacgacttttcaattcttttttctcgcttctacctatgctgttgatttcttctatcaaatttttaatatctaattcatcaaatttattgttttctaataaattggctgttgtttgtagccaaagatagaaatcctgttcgtacagtttttttgagtctatttctatttttaatttttccatagtttagttactatttaaatctagattttctgttattataccacagttagcaaagctgcctctacaatcattaaaaaactatagtgatccgatttgattcatgaatttttcgtggaggcagggaacagggaacagggaacaggaaagaaggctttccgtgtgtactgagttctgtatggctacgccacgcaagctatcaaaaatcaaataggagtcctatactaacatgaagcgaattatcctctacagtaaacccggttgccatctctgtgaaggtttacaagaaaaactaaaacagataacgagtattgcttttgatttggaaatacgtgatattacaactcgtgaagactggtttaatgcttatcagtatgaaattccagttttgtttttatcgaaccgcccagacgcagagggcgcagatgtgttacagcctatacctcgtccttctcctcgcgcaaatgttcggcagttggaacaattgcttttaaaatatattcccaatacagaaaataatcatgcagaataggcgcaaggttagcttgtggcgaggtgcgatatatgaatttacgggaattattagcggttgttgatggtttagaatgtcctcagtccgctgatgtggaagttcaggggatcaaaactaactcccatgcttgcggtgtgggagatttgtttatcggaatgccaggaactagagtagatgggggtgagttttgggagagtgctttagctgctggtgctgttgctgctattatctctccagatgcgatcgccaaatatccacctaaacaatcggaaatggtgatcagtgccagtaacatgaataaggtctgcgcggaaatttccgcagctttttatggttatcctggacgaaagctcaaaatggtgggcgttaccggcacgaacggtaaaaccacaactacccacctgattgaatattttctcacaaaagctcatttggcgacggctttgttaggaactctttacactcgttggcctggtttttcccaaactgctgttaatactactccttttgcggtagacttacagcagcgtttagctcaagctgttgatgctggatgtgagtttggggtaatggaggttagttctcacggtttatctcaagatcgggttttgggttgtccttttgaagtcgctgtatttaccaatcttactcaagatcatcttgactatcacaaggatatggaagattattttggggctaaggctttgttatttagtcctgattatctccaaggtagagcaattattaatgctgatgatgaatatggtaaacgtttaattgctggcttaggaaaagatcgggtttggacttacagcgttaatgatcatactgctgatttgtggatgagtggtttaaattatcagccaacaggtgtgagcggaattttacatactcctaaaggtgatgtcgcttttagttctcttttggtgggacaatataatttagaaaatcttttggcggctgtgggtgcggttttacatctaggtttagatttacaggtagtggcaaaatctatacctgatttccctggagtgccaggaagaatggaacgggtgcaaattagcgatcatcaagatattagcgtaattgtggattatgcccacactcctgatagtttagagaatttactgaaagctgcacgtccatttataccgggaagaatgatttgtgtgtttggctgtggaggagatagagacaggacgaaacgcccaaaaatggggaaaattgccgcagaattagcggatattgcggtagtaacgtcagataatccccgcacagaaaaccctgataagattttagaggatattttggctggtattcctgatgttgtgcaagcggtggtaattggcgatcgcgctactgccatccgtactgctattttggaagctcaacccggtgatggtgtattattagcaggtaaaggccacgaagattatcaaattttgggtacggaaaaaattcattttgatgatcgagaacaagcacgggaagctttacaggaaagaggtgacaggtgacaggtgacaggtgacagcaaagagacagggaaacagggagtaggaagcaggggaggtatgggaggaaagggaagttcataacccagtccccagtccccagcgatgcactgagcttgtcgaagtgtccccagtccccagtcacctaatcacccaaaatcagctagattaacttgtaggttaaaataggggcaaatatgccaagaacacagaaaaacgataactttgttgacaagtcttttaccgttatggcagatattattctcaaaatactgccaactaacaagaaagcgaaggaagcttttgtttattaccgtgatggtatgtcagcccaagctgaaggcgaatatgctgaagctttagaatattatgaagaagctttatctttagaagaagattctaacgacaagagttttatcctttataatatgggtttaatttatgctagtaatggcgatcatgaaaaagctttagaattttatcatcaagcaattgaattaaacccccgtctaccccaagctttaaataacatcgctgtaatctatcactacaaaggtgaaaaagctaaagaagaaggagataatgacgctggtgaagcgttgtttgatcaagctgcggattattggattagagcgattcgtttagctcccaataactatattgaagcacaaaactggttaaaaactaccgggcgatcgcaaattgacgtattcttttaatttggtgatgggtgatgggtgactggtgactggtgactggtgactggtgactgggtaaaaactaaattcttactatatattcccaattcccaattcccaattcccaattcccaattcccaattcccaattcccaattcccaattcccaattcccaattcccaattcccaattcccaattcccaattccctaaaaatgatagatcgtgaacaagtccataaagttgctaacctcgctcggttagaattaacaccagaagaggaagaaaaatttactactcaacttggtagtattttagaatatatcgagcaactgagcgagcttgatgttgctgatgtacctcccacaaccagagcgattgatgttagcaatataacaagagaggatatattaaaaccctatactaacagagagggtattcttaacagcgcacctgaacaggaaggtgattttttcaaagttcctaaaatcctcaatgctgaataaataacaattaacaattgataattgataattgataattgataattgacaattgtttaattcaaggtttcaaccctcccctttcaaggggataaaacccaaaaaaatccgctttttcaatattcttcctcattgtcaattgttcattgttaattgtcgattattgaaaaactaccaaaattaaacaaattttaggaagtttcaggggaattatcttcccctggtttcttgttgagtcttgattttacgaccccataacaaaacttgctttcgcaggtaaacacacaaccaaactaaaaagcctaaaaaattaacatgaataaacatcaatattgaaaatacttcattggtaataagcttgttcagcttctaactgacgaatcaaattttcatcaccttgagattttgccacctgtaaacgatgttcaacgctttttttcatactttgtctgtgtgcttcttcagctttttgaattgcttgtagtctatttctactcattgccataatttttaccttgatcctcttgatttcgatgtcatgtcttgataacataacacatttttgtagttgttgttacagaaaatttttaataattgtaaatctatgaatcaagtaaatatcttgactttgttaagtgattttggatgtaatgatatatatgtcggagtaatgaaaggtataatttgccaaattaacccaaatctgaccttaatagatttaaatcatcaaattccaccgcaaaacatcgccgcagctagattttccttgatgaatgcctatccttattttccccagggtacggtacatttagcagtagtagatccgggggtgggtagtcaaaggagagcgatcgctctaaaattagatcaaggttatcttgtcggaccagataacggcatttttagcggtataattgctgaaaataaagtaataacagcagtagagttaacaaactctcagtattggcgaacatctcaacctagcagcacctttcacggtagagatatttttgcacctgtcgcagcacatttagcaagtggtgtatctgtgcaaaacttaggcagagaaatcaatccagaaactttggtaaaattagatattggcgaatgtcgagaaattactaacggtatagcaggttgtattcactatatagatcactttggtaatttaatcagtaatattcctggtaggtttgtggagggtaaaacctggtgtgtagaagttcaaggtttgcaaataccaggatgtgaaacttacagtgatgtggaagttggggaaattttagctttggttggtagtcatggatgggtagaaattgctgtatataaaggtaatgcacaggtacaattgcagagaaaatatttagatcatttacaaatcttgtttttgggagattgttaatttggcgttgcataatagagggatgaattgagggttgatacggtgcattgtccatactgtgggtctactgagattagaaaaaatggaaaacgcagaggtaaacaaaatcacatttgcgtcaaatgtggtcgtcagtttatagatgtttatagtccaccaagaggatactcaaatgaagtgaaacaagattgcttaaaatcctacgtcaatgggatgggatttagagccatagaacgtactcaaggtgttcatcatacaactgtaatttcttgggttaaacaaattggtgagaaattgccagatgcaccaccaattgaggaaataccagaagtaggtgaattagatgaattagagacttttattggctcaaaaaaaacaaaatttggttgtggacagcagtaaatcactttagtcaagggattttagcttgggttttgggagaccacagtgcggaaacttttcagcctttgtgggatattgttaaactctggcaatgctatttttatgtcactgatggatggaaagtttatcctagtttcattcaaccagaagaccatattgtgagtaaaacatatatgactagagttgaaggagaaaatacacgtttacgtcattatctagcacgtctacatagaaagacattatgttattctaaatccgtagatatgcttaaatattcagttagattattacttcattatttgaaatataatcaaatacccgtgttcaactaattcatcccacacttatgcaacgcccttttaattgttcaaattgcataactacaatgcgtttaccagtgcgggtttctcttcgtaaactcacgttactcagttcttcaaataaacctgcaaaaaattgaattgatggaggagtagatgtcatgattaattggtgattggtaatgggtaatgggtaatgggtaatgggtaattggtaattggtaatgggtaattggtaattggtaattggtaatagattaatctaaaatctaaaatctaaaatccaaaatctaaaatccaaaatccaaaatccaaaatctaaaatctaaaatctaaaatctaaaatctaaaattctcctgactcctatcttggtggataatattgtggagtcatcataggaggttgataagtacccatcggtacattattaaccataccattgggtggtattggactcattacctggggttgaatgaaaggttgaatgaaaggttgaactggttgaactggttgaactggttgaactggttgaactggtggttgaaaacttgtggatggtggattagttgatggtggattatttgtaggagtggggggtgtgacattcgtttgactaaagttttcgtaagcagctttagaaatagaactaatcagtgtttccgcagcagaatcattatgaggacgttttaccatgacagcagtaatgtaacgcttaccggtggggatatcaattaaacctgcatctcctaacattgtgccaatatcaccggttttatgatatgctcttgctccttctcctaacccagaaggtatgagagtatttctttctgtgcgacgcatgatatctaacattaaatcacgcgatcgcatactgactaaattaccttgattcactttagcaattaaatctgctaattctttgggtgatgtggtgtttgtaccttctaaatctggtaaaatattacgaatagctgtagttgttaatccccaactgcgaaaacgcccatttaatacttcctggcctcccagtctggtaatgagcatatttgtggcagtgttatcactgatagtcatcatttttgtggctacatccaacgctgtgtatttactacccacaggttgagtgcgtaaattaccagaacctcctgccaccatttccttttccatagtcagcatttcatccaagcgaatttttcccccatcgacatcttggaaaaaagctactaaaatcggaattttgatggtgctggcagcaggaaaacttgtactagcattaatatctacataatcacctgtatctaaatctaccatgaaaaccccaggcgttagacttgggttggcggtagctagattttgtaaagtagattttaaagtggtaatttcttgagctaagactaaaccagaaccagatgcttggttattagcatgagattgggtgatattggtctgagatggagatgcagaggttgtagtgatgcgataagcagggtctaatattgataatatcgtgccgacaattgcacctagtccgataccaacaatcaataaacgcaaggtatacaatacagccttagccattggctttaatcgcgttttccgtgatgattgcctggttacttttagcttgccttgcttttgtacacgcactgtttttaatttccctgtaaccgattgtggcattttggttgacatatttgcccttggtttagggatgggtttaacagctgtcggcatgactaaccggcttgatggtcttcgcccctcagttgtaacattagcagaactgataggattgtttaaccttgtgagtgctacagtttcgcctctgtttgcaccctgctgttgcttcctggcttgtttttgtcctgccttttgggactgtttttggggttgtccttggtcttggctttgaacaggacgcggacgacgacgctgggaagactgccgttttgacacagctattagtttgtcatttgattctgacactgctactccttagttacccactcgactgttttgtttgtcaaatttcgacccaaaactaactacactatgcaccttgatactcagaaccccttctgttactaagcagcatttttcagtttagtgtaagtcataatcaatgcttttggaagatgatatctaaaaaatatataggactcctatttgattattgaaaaaactccgtacaccaaaattctctaaaagccttttgcatgagtgcctcttgcctgcctacacagataaatgataaattcagaagtcaaacccgatgactatagttccatcatagtcctgagttttctaagctgttgtaattttgaattgcccattgtacttgtttaatcatacctctgagcatagcaacttccgtggtttgtaggtgggcgcggttatataaatggcggaatttttccatcctactggctgctgtgtggggataaagataacctatggcaagtagtagagattctaattcctggtagtagggttctacagtgtccaagggtgctgtttctgttgtcggtgttttctgggtgataaaattttccgctagttgtgataattcgtaacaacagattgacaccgcagtagctaagtttaatgatgggtattcgggatttgtaggaataaatactaacttttgggcataattgatttcttgattggttaatccccgatcttctctaccaaaaattaatgctgtgggtttttctggttctgctaataaccaggggaaggcgtgacggggtttttctaagggtaattctccgctataatctctacctatggtagcgatcgcacgggtacatcctgttaatgcttctggtaaagtatcaactatgactgcattttctaatatttctttagcgtgaactgccatttttaaggcttcaaaagataggcgatcgcactgcggatttactaagattaaatcacataaaccaaagtttttcatcactctggcaattgaacctacatttaattctcctgctggttctactaagataattttgattttcgagcaggttgttttttctgttgtcataaaagatcaaggagtcaggagtcaggagtcaggagtcaggagtcaggagtcaggggaaagttaataaaccaattaccaattaccaattaccaaataaagtttattttattaaatcatcagttgcaggttcaccgggtaaaaagctatctttgacaatttcatctaaactataattacattgttctggaaatgttgaaaatggtaagtttgtttctcctgatgctaaatctctaccattttcataagcttcactgttcaatatttctagttgagattttaaactaggattttcatttaataattttaagatatcccttctttgaatgcgaattgttgctaaccaactgcgactgcgtttacctggttgatattcccattttaataaatgtccgattaaaatactcagacggtttcttaattcttgtcgttcctttctacccaaagattcaatttcctctattaaatttgataagtctaaatcatgccattgttgatgtcgtagaaagttagcttgttgttgagtccattgataaaagtcaatttcatagagatgatcttgaaaatgatctttcaggtttgctgcggttggttgaattttagggatttgcataatcaaaaatctggtgaactgtaataattataatatatacatcatggaataggtgacaggtgacaggtgaaagttcatagataattatttgttaccaattaccaatcaccaattacccattacctaaaaggtcaccacacttcttattgattcccctctgtgcattaaatcaaaagcatcattaattttttcaatgggcattacatgagtaattaaatcatcaatattgatctttccatccatataccaatctacaattttcggtacatctgtccgccctcttgcaccaccaaaagctgaacctttccaaactcttccagttactaattgaaagggacgagtgctaatttcttgacctgcaccagctaccccaataataacacttactccccaacctttatgacaacattctaaagcctgacgcataacttttacattaccaatacattcaaaagaatagtcagcaccacctttagttaaatctactaaataagcaactaaatcaccttcaatttcgttaggattgacaaaatgtgtcatgccaaatttttcagctaaggcgcgttttttgggattaatatccacacccacaatcatatttgcacctaccattttcgcaccttggatcacatttaaacctattccccccaaaccgaaaactacgacatttgcaccaggttcaactttagctgtattaataactgcacctatgcccgtagttacaccacatccgatataacaaactttatcaaaaggcgcatcttcccgaattttagcaactgcaatttctggtaacaccgtataattagcaaaagtagaagtacccatataatgatgaatcatgtcaccaccaatactaaatctactcgtaccatcgggcatcactccccgtccttgggtagcgcgaatagcttgacagagattggttttaaagcttaaacaatatgcacactgccgacattcgggagtgtataaaggaatgacatgatctccgggtttaacacttttgacaccttcccccacttccacaaccacaccagcgccttcatgacctaaaatagcgggaaataaaccttctggatctgcaccagaaagggtataagcatcagtatgacaaactccactagctttaatttctactaatacttcccccgcttgtggtccttggagttgcacggtttcaatggttagtggttttcctgcactgtaagcgatcgctgctttcacttccattattcacttctcccctaaattaactgatctaatctaaagttaatactactgtcacctgtcacctgtcacctgtcacctactcactcaagattttttctgagcgatcgcttgccaaactctattaccgtatagtacattagtaccgattacaagagaaaccccccagtctcacaaacttgggttattatttacttctaactcctgactcctattcctaactagcaacttgggttattatttttgaatgttttttcaatgattttcgggtacggtgattcgcagattttgttaaaatctaaatctcaataacaattcctttattttgtaacaaacatgatgaaacctgcccttactaaaatcggcactcaaatgtctaacttgactggcgtaagagcgattatgaaagatattaatgaaacactccgagccaatcaggggcaggtattgtataatttgagtgcgggtaatcccctgattttaccagaggttgagcagttatggcgtgactgtaccgcagatttgttagctagttctgagtatggtgaagttgtttgtcgttacggttcttctcagggttatgcacctttcatttccgtgatggtgaaggattttaacgagcgttatggtttaaatttaacagaacggaatattttagttactgctggtagtcaaactatttatttctacgctgctaacgcttacggtggctatactaatgatggggatttaaaagaaattgttttacctttaagtccagattatacaggttatggtggggtgagtttatgcccagaagcattaattgcttataaacctactttagatattgacagcgccaatcatcgttttaaatatcgtcctgattttagccaactttcgattacagaatcaaccggttgtgtgattttctcccgtccttgtaaccccacaggtaacgttttaactaatgatgaggttgaaaaaatcgccgctttagctgcaccttacaatgtaccagttttgatagactcagcttatgcgcctcctttcccagcgttaaattttacagagatgaaacctgtatttggtgataacattcttcattgtatgagtttatccaaggcaggtttaccaggggaaagactgggggtagctatcggtgatgaaaaactgctgcaagctttagagtgtttccaaactaatgcagggatacattcttctagatatggtcaggcgatcgctgctcgtgcgatagaatcaggtgcattagcggatattgcggaaaatgtgattagacctttctacaagaataaatttgatgtattagaaagtacattggaagcagctatgcctaaaaatttaccttggttcttacatcggggtgaaggtgcaatttttggctggttgtggctgcaagatttaccgatgactgactgggaattttaccaggaattaaagaaagtgggtgtgattgttgttcctggtagtgggtttttccctggtttaaaagatgagtggcatcacaagcatcaatgtctgcgtatcagtttgactggtagtgatgaggaaattactatcggtatgcagcgtttggctaaggtagcagaacaggtttatcaacgtgaagcggtgagtgtgtaagaaggcaggaggcaggaggcagaaggcaggaggtaagaggatttaatgaaccaaatgaaccacgaagacacgaaggacacgaagagaagaaagcaggggagcagggagcagggagcagggggaaaaaagaaaaagtccccagtccccagtccccagcgatgcactgagcttgtcgaagtgtccccagtccccgatcttgatcactggatcgagattggtaaaattgttgcacctcaaggtttaggcggggaggtgcgggtttatcctaatactgatttcccggaacggtttgaggaggcgggtactcgctggatgttgcggccaggggagtgtgaaccgcaaccggtggagttgttacaagggcggtatctggagggtaagaatttatatgtgattaaattggaagggatgagcgatcgcactgctgcggaaaatctgcgagattgtcggttgtttgtccctattagcgatcgcccagaattggaagagggggaatttcatgttatagatttaataggattgtctgttttcatgcaggaatctggggatttaatcggaacagttgtagatttattaccttctggtcatgatttattagaggtgaagtttgatcctgcttttgatgaaaaaaaagctggaaaaactgttttaattccttttgtcatggaaattgttcctgttgttgatttggaaaatcggcggattgaaattactcctcctcctggtttattatcaattaatgattaacagtatttaatcaaaaattcttgtggggtagacatcttgactaccctactgatcaattgataattgacaattgacaattgataattgtttcatccaacgacgtgaaccaaaatatttacaagcttccgcagcaatattacttgctaattccaaggattgaggaaagttattttgtaggatataatgacaaaaagcaccatgaaaaatatcacccgcgcctaatgtatcaatggttttaattttgggaacattaatcaaccctttttctttattacttaaatattctatgggtttttctccatgagtaatggcaatgtaagggatgttaaaaccttgcaaataattaaaaatatctgcttgatttttgcagttgggaggataaaagttagccgaacaaatagcataatctacaaaaggtaaaatttcttcaaaacctgctttccaacttcctccatcaatgacaacaggaatatttttatttttctttttatttttctttttatttttcgctttttcggcaatgattttacttactgccatttgatgtccatcaattaaaataatatcaatattatctaatatatcatcaggaatagagttaatatcagcttgggtttttacggcatttatagaaattactgctctttctcctgtaccttgggtgacaataattgaagatactggtggggatgtttgtttattaggatctaagtcaattattcttacttggtaatttgctaaatctgtagtaattaattgtgtcatggaatgagaacccagaacacctaaaagttgagatttattacccaagtaactaaatgtaacagatgcgttggttgctggtccacctgctgctacagtataatcattagcaactaatttttgattgttctggggtggtgattgggcaaggtaaatgaaatctaaagtaattaaaccgacaaataaagctgatttagtcattggtgattggtgattggtgattggaaaattatacaggagaaacagaaattatgtttaagaacatggcaatggacgcactgggtttaagtgatattggtgctgtgattaaaccagaagattataataaggttgatagtgatgattacgtaatgcacgaagaaggggaaaaaatctactttttgattaaatcaaaaactgatgaatactgttttacaaatttagcattaatccatcttgatggtagttctgctatgagcaaaaaacggttactaaatcgttatagctacagtcaaaatatcattagagatgtaaggttagaaaccgcaggaacggtagatttagatattgaaattaagtttgttatgggggataaatcctattctattgatgtggcaaaaaattttattgctcccttaaaagatttatacaaagcattggtaaaaatttcttccattcaaaaagaaaatggagtttattaccaatatgctcaaactagcttaaatactgcttctagtacagtaggtagagcaactaatatttccacttcagaagaacagtttaaggctattaactggtatgcttttaattggttaaaatatgcccatgaaacttatgtgagaaaagattttggggaaatttttgagaagtttattaataattaagcaagcattcagctatcagtaatcagctatcagttttattatcaaataagcaaaattttattgatttttttagttgtttgctgatagctgacggctgaatgcttacacaaaaacagccttctacctgttgtcttctaaaaaataataattatggcaactgaacccaaaccaggaacattatacattgtcgggacaccgattggaaatctcgaagatatgacttttcgggcggtgagaatattacaatctgtagatatgattgcggctgaagataccagacatacaggaaaattgctgcaacattttcaaattaaaacaccgcaaatgagttatcatgaacataatcgtaatagtcgcattcctgaaatattagaatctttaaaatatggaaaagcgatcgcattagttagtgatgcgggaatgccaggaatttctgatccaggatatgagttaattaaagcttgtgtagatgcagaaattgatgttgttcctattcccagtgcgactgctgccattaccgctttaagtgcttctggtttacccacaaatcggtttatatttgatggatttttacctgcaaaaagtcaacacagaagggaatatttagaatctttgttaatagaaaccaggacattagtattttatgaatcaccccatcggttgcgggagacattaaaagatttaggagatatattagggagcgatcgccagatagtaatagctagagaattaactaaattatatgaagaattttggcgaggaacaatagaagaagcgatcgcccattatcaacaaaaagaaccccaaggagaatataccctgttagtggcaggaatagaacccagcaaaccacaaattacagaagcagaactcaaagccgaactattagcaatgatgaaacaaggtgcttctcgttctcaagcaagtagacaattagcaaaagaaatatcaatttctcggaataaattatatcagttggcattaacaattgaaatagataatgaataaaattaatctgcgtttatctgcgttcaatatcaaaacaaaaaaaacaggagaagataaaaataaatcttcttcctggttaatagctactaacacttatttctctgcgttctctgcgcctctgcggttcgtttcttccaaaaaattaagacacaaacgcaaaatctgtatttacattcaaaccaatcacaccattaacaacagcaacagtttgaccaagtaaacgcaaattctggagtcacgccgaacaaagtcttgtacatgagatcatatatctcagtattatccagagtgctaggtaattcacctgcattcatcccataagctttagaacccacattccgcaccctcaactgtcacagatcaaaaaagccattaaagtagtacataataactaaaggtaacttaaaagttaagaggcttaatgagagtaaatagcattaagctgggtatggagtgagaaagtgaaacttcgtaacgggacacagagagaagattcaataggaaaaaaattcattgttcagaaa

SEQ ID NO: 85 - DNA, 20072 bp, Sphaerospermopsis sp. LEGE 00249
  LEGE00249_103
ccaatcaccagtccccagtccctagcgatgcactgagcttgtcgaagtgtccccaatcaccaatcaccagtcaccagtccccagtcaccagtcaccagtcaccagtccccagtccccagtcaccaatcaccagtcacctgccgccattttaccttaacaaaatgcgcttcacgtccccaagtgtcccgtgtaagaatgatattttcaattgcaaggttaaaggggatagctgttgttaaataacgttgaacgaaagcacctaaatctggagcaagttcagaagccgtagttgcagctaatcctaaacctactagttgctcaacaggtctaaatggtagcatcacagacacacctatagcaaatccagcagttaacaacattgctacagataaatttgtaccgcaacggggatgtactgctaaatcccattctccgttggtaagacgatattgagctagtgttactgcacgccgtaaataactgatatttacatcaccataaaggtaaaatccctgttctgtggataaaccacttaatgattcgttatcaaactgtacatgagtaggctgtttgggagaagaatcaacactttttgtctcactcagaacccaaacagtagcgtgttctagggcatgaacctgacgcagcatgagaatttcttgtaaaccgggtacaaaagatagctgttgtagtaagtcggtatcttggtttggtgatggtgctatcaagtcaagattaaaaaagttaaagggaaatgagctatttgcataagaagttggagtattcattttcccccaagcggataaagtaatatagatttctttccaatgtaacgcttgtacaactagattattgctaatttttgttgaaaaatagcaggagtcatgagtcagtaggggtttagcaatgctaaaccctttggcctaaatcaaacgagaaattctgatatgtatgtcagttccgatcgcaaaaattcgctgattcccagagcatcaacttttactagataaagtcacggaacttgtggtagaggttcacactgaaaaataaaggtgaggaggagaacagtctgtaaacctcaaaattgatcttgccaattttagattttagattttagattttcgattttgattgaggtgttttggtacttgtacttcagaagcaagctcaatactccactctttgtcggttgtacctatctcaaatactcgctgcgctgcttacgcttcgctaccccaaatcgaaaatccaaaatggttgaacttttcagcatccacagggattcatattaataaactaactcacatttgaatcattgtagttaggtaatgtacagcaattcacatcgtttaaacagacctttccccactgtaaagcccagcgaaccaaagcgactcggttatctgtctttgttttggtgagaatgttgctgatatgattatcaactgtacgtttgctaatctccagttttgctgcaatctcttggttagttaagcctgcggccactaagtcgataatttgcagttctctgtctgacagactaacaggggtcccagactcactagcagccatagcttatttatttctcccttggtatatgtacttaatcactctttctaattctaaaagattctctcagagctagacgttgtaaatgttcctagtaatactaaagtcaatattttctgggaatttaatctgaaggttaattttcttaaaagcaaaatttctataaaatataacctattcatcagtaaatattcagtgttacttcagtggtaaattttgggtttttatagcattatgtactatataaagtgataaaaactgctattttatggttaactggagacaaaggaataaagatgcttatacattttatacatattcctaatcccaagtcgtaaatcgaaaatgatatgagtaatccccatgttttgtgtctaggcgaagttttgtttgattgtttagcggatcaaatggggctaaagctggaagaagtcaattcttggactccctacccagggggagcgccagctaatgtggcttgtgctttagttaaactgggaacgcccgcaggttttattggtgctgtaggagaagatcaaccaggtaatgcactggtgaagttattacaagatgtaggtgtagatacaacgggtgtgcaacgtcatccgacagcaccaacgcgacaagtttatgtagtcagggatttgactggcgatcgctcttttgctggttttggtaaatatgatactagcgaatttgccgacacccgcttacaagctaatcaattaccccattctttgtttaacgatgctgattttttggtgttggggactttggaattagcttatcctgaaagtgaggctgctattcatcaggcattgaaattagcggaacaatatgatttgaaaatcatcttagatgtgaattggcgacctgtattttggcaagatgctaatttagcaaagcaaaaaattgcagcattattgccacgttttgatttcctcaaactcacaaaagaggaagcatcatggttgtttgatactacagaccctggagcaattacttacagattaaactcattagaaggggttttagtcaccgatggagaaaatggttgtgcttattgtttaggtgaaaacgaaggtaaattaccagctttttctatacctgtggtggataccactggtgcaggagatagttttttagctgggtttctccatcagttgagtaagttgggtattcatagtttgagagatgcagaaacagcaaaacgagttgttacatactctagtgcggtaggggcgttgactactattaaaccaggtgcgatcgcatcccaacccacagcagaagaagttgatgcttttttagctgatcatcaactttaaaaatcaacagttttcactgattgaagtaatagtacaatgaggggaatatcaaatacaatcagctgatattcccttgagatgagataatttgtagagtttgaataacaacccaaatatgacaaaccacaaattaatgctggaaattccagataatctatttaaaaaattgcatcacctagccgaattaacagatcaatcaatcgaatctttagcggtgcagagtttaactaacaatttacccgtattttctgaaaaaaaatacaacttggatgatttgctatcaagagtatcaacagaaaatttacacaatgaaatagataccggagaacctgttggtcgtgaatgcttctgagacaatatacattccccaacagggagatataatttggattcattttactcctcaagttggaagagagcaagctggtagacggcctgccattgttatttcacccataaaatataatcgtcgagtaggcttggctttggtttgtccaattaccacaaaagtaaagggctatccatttgaggtaattttgccatcagctttagctgtatcaggagtcattttagccgatcaggttaaatccttagattggcaacaaagagaagccgattttatttgtaaagcaccgcctgaagttactgttgaagtcatcagtttattaagaaccttaatgcctttgtaatggggataattatcaatccactgcacaagaagttgatgcttttctagctgctcatcaactttaaaggttctcagttattagttcatttacagtgaaacaatttgtaatcatacccatatattcctggcaacttttgatcatcaagcagacatttttccacttcctgactaatgggagcatgaaaattaaccaaccataaatcaaaaggtcttggtaattctttgatagttttttctagggctatagtagaagtattggggttttgggcttgatgggcgaggagaaattgagtattgtcaatattaacttgcaaaccagagaattttaattcccaagctatacccatcatttccccagtttgtactaaacttttatgagttgtggcaatgagaaccgggactgaagaattttgttcaataacaggaagaaataaatcagggcggtaatatttgcgataacccaaattaaaagtaactgtaatagcactgattaaccccattacccaaatcagcattacagcttgtttgcccgtaataccccatttaccgatgttgggattttgataacaaactgctagacttgcacccagtaaaattattaccgctggaaaataaacaaaactatagcgagcgcccctggtaagatcaatacccaggaaataagtaaagaagaaaaagaaagcgatcgcccctaacactaccccaatcaatacttgagtaatagaaccaatttccggtgcttgtaattgaacttttatccccctaattaaaattggcactgcccaaataaagaaaattaacatcaccaacccagagaaaataaccaccgttaaatcaggtgcttccactgggagtaaggaaatcatagtgatccatgtacctaaagcttgaaaaatggggctaatccaacccagtccgacccgttcacttttaatccactctgtcatactactgctgtagcgattttgtaaccaaccaggcaaccacactaacccagcaacagctgtaccagctactacataataaaatcgccaccacacaggagagaacaacacccaagtttttgtctgagtttgttgtttccaagccacaaaaatcaaagctacaacttcagcgccaagagtgatcacaaaaaagaaatgagtagcaaaacccaaggcgttaactcctacccaagcaataattaaccacaaaggtaataatttttgcttttccaagtgacgaacagcaactaccaaacaagctatcgaaagcatcacccacagcatagccaaagtataatgacgggcttcttgtgctaaaaatactgcgtagggtgagactgccatcattgcagccgctaattgtcctactaatgaagaacgaaaagctaatttacctaaaaaataagcacagggaatagaaaccacacccagtaaagccggaaatgaacgtgctgccaacaaagatactaaaccttcagggtggggaaatagccgcatccacagatgaaccagcacaaaatatagtggtggatggtggtcttctataactatattagagatgacttctcccacaccaactgcgggattaatttgtaatggttgtaataaaatatcaggagcgatcgcctgatctaaaggtactggtaaaaaactattgcccaggctaaatactaaagtcgcaaattcatcagtccaaggcggtttggcggttaaattagtcaaacgtaaccctacaccaataacgaaccaaatcagcagcagtaaaaaatgaaaccagggagcagaaacggtagagcgcctattattcacgtccatctttattattggaaaattgttttaaacagcgttcttgtactttaactacagttcctctcttcaacaactctgatatagtcacaaattcatatccctggggagtataagctttcaaaatttcctccactacctctacagtattatggcgactagcatatactcctccttttgctacaccatcagaatcatgtaaaagaatgattgagccattatgaaagttattttcaaaaattttcatcatctctgcggcagatttaccacgccagtcttgtaaatctacatcccaaaaaataatcggttttttgatctgctttaaaacatttgtgacaacaaaaccagcacgaccaaaagggggtctaaaatgaacattgtctcgtgagattaattgacttcactatcaataacagaggcaataattgggaaaatctgaatttcgatggacgatgtttgtcaaaacgcaggaaagaaaatccctgagtcaaggggagtcgtaggggcgaagcattcgggcgactaattataaatttttgtccaaggctattttccgaatgcttcgcccgtacaggagtcagaagtcgtaggggcgaagcattcgggcgactaattataaatttttgtccaaggctattttccgaatgcttcgcccgtacaggagtcagaagtcgtaggggcgaagcattcgggcaatcaattatcaattttataaacaggctattttccgaatgcttcgcccgtacaggagtcaggagtcgtaagggcgaagcattcgggcgactaattataaatttttgtccaaggctattttccgaatgcttcgcccgtacaggagtcagaagtcgtaggggcgaagcattcgggcgactaattataaatttttgtccaaggctattttccgaatgcttcgcccgtacaggagtcagaagtcgtaggggcgaagcattcgggcaatcaattatcaattttataaacaggctattttccgaatgcttcgcccgtacaggagtcaggagtcgtaagggcgaagcattcgggcgactaattataaatttttgtccaaggctattttccgaatgcttcgcccgtacaggagtcagaagtcgtaggggcgaagcattcgggcgactaattataaatttttgtccaaggctattttccgaatgcctgtctgccgacaagcaggcttcgcccctacttcgcccgtacaggagtcaggagtcaggcaaaattaatttaaaaccaaatgctttgagttagcttttttggatcggaatatcaggtataatcatcagatacaattaagtaatattcccttcatcttgtacctaattcatgtctttgattattgctggagaacgcagcggagtgggcaaaactacggtgacacttacacttttagcctctttgtctcgtcgtggtgtcaaagtacaatcttttaaggttggtccagattatattgatcctatgtttcatcagtatgttactggtcgtccttgtcgaaatttagatgcggttttgacttcagaaagttatattcaaaaatgttttcagcgtcattcccaagaatgtgaatatactctggttgaaggagtgatgggtttatttgatggtgttggtaattcttggaatacaaccgaaaatggcaatcatcaaatggactttgctagtacagcccatgttgccagattattagatagcccggtaatattagtaattgattgtagtcgtttgtctggttcagtggcagcgatcgcacatggttattgtagtttggatcagagagttaaaattgctggattagtcttaaatagagtagggagcgatcgccatttatctttattaaaaaattccttgaaaactctcaacttacctattttgggtgttctcagaagacaggataatattactattcctgatcgtcatctgggtttagttcctactggagaattaccagaattagatgatgtaattcatcgtcttgcagatttaggcgatcattgttttgattgggaaaaattactaccactattacaagtaactgaaattctgtcttcagatgttcctaattttcaaatcaacgaaccgcacagacacagagaaagcggagaaataaaagaaaatcaaaaatcaaaaatcaaaattgctgttgcacgggatcaagcttttaatttctattatcaagacaacttagatttattagagaacctgggagcagaattaatattttggagtcctttaaaagatactcaattaccaaaagatattcaaggaatgtattttggtggtggttttcctgaagtatttgcacaagaactagcagcaaatattaaagttattcaagaagtaaaaacagcgattttatcaggaatacccaccattgctgaatgtgggggtttaatgtatttgtgtgaaaatattattgattttgaaaatcaatcttggacaatggtaggaatattacccacatctgcacaaatggataaaaaattaactttaggatatcgtcgcgcagtagttttagaaaatagctttttattaaatgcgggtacaaatatttatggacatgaatttcatcgttctcatgtaattacaaacccgcaaaaatcattgtttgatacctatcgttatgactgtgaagaaaatacaggttttgaaggatggaatttacctaatattcctaatgttcatgcttcttatgttcatcaacattggggagaaagtatagaaattccccaaaggtttttacaagaatgtttaaaatttagtgcggtacaaaaaccgtcagggaatgaattccccaggggaaacgcatcttatcaataaggacaattcaatctcaataatgacctaaaaattcgcattaacgtctacattattgacaataatttaaaccatcacgatgactctgaaaaaatcaatcaaacgataaataaggattccttcgtttgtacataaaaatggtgttttgtcaataaaatttagatgcgtttcccctgttccctgttaagagttccctgttccctcttacccaattagtaatttagcataacaagtaccgaagaaccagaattagtaataatcattactaattcttgattagctaattcttggggaagttgtaacaataatttaccttgtgtatcaacttttgatttaagtcttatttgcatataattaactccttagtatcttggaatattatactactaattgcttctaaccttcgggatctcctaactaatgactaatgactaatactttcattgagtttacgaataatacgagataattgacgaataatattcaccgctatttctggagtttcttcaatagcatcataaagttgctcttgggtgagttctaaacattcacaagcttctaaagttgtcacagaagcagaacgagactgagtatcaaatactgccatttctccaaagtattttcctgtatcaacttctgctaattttgtatctccgatatggactttgactttacctgagacaataatatagagcgatcgcccttcttctccttgtttgaaaatactgtgattcgcagggtatgataactcattcatcacagaagcaagtcgcacgacaaaatcatcccgcaattctttaaaaataggtacgcgacggacaaataataaacgatcaacgctagtaagcataattactgtttataaaattaacgaggttttgacagagtaaaaagagtaaaaagagtaaaattttaaccgttaattaggggttgctgagaaagtctttccgtgagggcataggagtcaggagtcaggaggagatttgaaaatttctttgccatctcttgaaatcccaaaaaatgcacactaatttctgtgtttatcagcgtgtaacctttgatatatcaaggttttaggtttattcagcaaaccctaattaaccctcagaagtaaataataccttaattttggttactctgtagtttctctgtgaaagatagatgtatttatactgtttattaacgtgcaaataaatgcgtatactatttattttatacctataaatgattaaataggtgatgctcacaaatattttctattttcctctattttccctcaagaagtttagatttcagtcttaacaggaaaattaattacaatagtcccagggaaaaaactattaagtaaattaatctttactaaagtacaaaaactaccatgattattgatataatgaattggattgtgaggtataaataatatttcatgttagcaggatagacttgctgggaaagttctacctaaatttttgatattgctacttgacatttcttgatttacagcttcctagctatgctgaaaggagaagtacgcataacagataaagaattatatctttctccaaaaaagcctattcctctacctccaaaacttgttaattcaggtaaaatcaacttatcccaattattggtctgcttttacaatgattggtaattggaattaacaacttttagaggcaaaaggcaaaagctggaactttgatttcccctattctctattccctattccctattccttagaaaatcaatgtttttcaaatggtgctttagagttattatcgtttgcttgggtttgtggctcatcttggatctagcttctcatttaggggcggaaattttttggtttcaagaagttggttatttgccaacttttctagtgcggttaataactcaaggtgctttatgggtgagtgttgttagcttgagtatgatctatttactgggaaatttaattttagcaaaacgttggcaatatccccagtctctgaaaattgagccagcaagaattgaacaaactacactgagtagggaactaacaaattttctgagtccgcaatataagcaaatttatcaaactccgccaattgcgacaggaaagacacaaattaaattattctggttgttaccgctaacgttaagcttgagttttttagtggggttaattttcagccattatggacaagttgcgttaagttactggaatggagaaattaatcaggttaattcaccttttactatcttatttagaccagagatagtttggaacttgagcatgagaattattgggcaagtctggtattttgctttagcggtagtgatggcgatcgctcttttgatatattctcagtttttgctgtgggcgatcgctattatttttagtttcggttttgggtggttaatatctcaacaatgggaaaaaatcttgttgtatttgcactccacccccttcaacagcacagaacctttatttggcaaagatatcagcttttatattttttcccttcctctctgggaactgttagctttttggctgataggtttatttttatatggttttcttgctgttactctcacctatcttgtatcaggagacagtatcagtcaaggcatttttcctgggttttcgcccacacaaaaacgtcatttattcggcttaggtggcggtttaatgttggtgatagcctttggtttttggttaagtcgttatgaactggtttattctccccgtggggtgagttttggggctagtttcactgatgttaaaatacagttgcccgctgataccatgttatgtgttttagctgtggcgatcgccttttatttattatggcaaactttattttggaaacccaaatctcaacatcatcaatgggtaatttatagtttaggtatttatttattattattaattgcaggtgattttattgtacctgcggttatccaatcttttatagttcaacccaatgaattacagagagaaacaccttatattcaacgcactatcgccctcactcgtcaagcatttgatttagaagccatagatgctcaaacttttaatccccaaggaaaattaacccaagcagatatcaaagccaatgatttaactattcgcaatattcggctttgggatcaagaaccactattaaaaactaaccgacaattacaacaaattcgtccttattatgcgtttcctgatgccgatattgatcgctacattatcagcaaccaaactaaccaacaagaacccccaacaaatgaaaaacgtcaggtactaatagccgccagagaattagattataatgctgtcccacaacaagcacaaacatgggtaaaccgcaatttaatttacactcatggttatggttttaccatgagtccagtaaatacagttgcaccaggtggtttaccagaatattttgtcaaagatattagtggtaatggtgcagctttaactactgctaatgcagctattcgggaaagtattcctattggtgaaccgcgaatttattatggagaaatttctaatactcatgtcatgactgggacaaaagttaaagaattagattatcccagtggtagtgataacgtttataatacctacgatggcagcggtggaattagaataggttctttatggagacggtggttatttgccacatatttaaaagactggcaaatgatatttacacgggactctctaccagaaacaaaggtattattccggcgaaatattaaccaaagaattagagcgatcgccccttttttacaatttgatagtgaaccttatatagttgccgctgatgccaacccagatgataaaaatcaacaatttcccggtgcaaaaaattatctttattggatagtagatgcttacactaccagcagtcattatccctactcagatcaaaataaagacggtattaactatattcgtaattctgttaaaatcgtcattgatgcttacaacggcactgtcagattttatgttgctcaacctcaagatccgctaattattgcttggtcaaaaattttcccgcaaatgttccaaccgctaacaaatatgcctattaatctccttagtcatattcgctatccggtagactttttcaaaattcaatctgagcggttaatgatttatcatattactaaccctcaagtattttataaccgggaagaccaatggcaaataccccaagaaatttacggaactgaaccccgtcaagttgaaccttactatttaattaccagtcttcctggtgttccttttgaagaatttattttattgcttccttacacaccaaaagaaagaacaaatttaattgcttggttagcagcgcgttctgatggagaaaattacggtaaattgctgctttataattttcctaaagaacgtttaatttatggaccagaacaaatagaagctagaattaaccaagatccagtaatttctcaacaaatttcattatggaatcgtcaaggatcaagagcaatacaaggtaatcttttaattgttcccattgaacaatctttattatatgttgagccaatttatttagaagcaacccagaatagtttaccaactttggttagggtagttgttgcctatgaaaaccgcattgtcatggcacagacattagaacaagctttacaggcgatttttcagccagaaataacaccagcgccggctattattcgtcctgtggaagaagaaggtataccgccggtttaaaataattcgtaattcgtaattgattctgtcctaaagatgagttagtatagaacctatgcaacaaatagtctcaaaatcacagctataaattgtcaaaatcaataattatgctgttaagtgattatcttaattctagtagtttgaagtcattttctatcaacggcttatttggctataaagatgtgaaaataccttttgataaagaagctgttattcttatagctgaaaatggttctggtaaaactaccattttaaatgctctttactattcaatatcttgtaagtttagtagattaattaccattgattttgaatcggtcgttcttgaatttgcatctggagtaagtgttgaaattaaaaaaagtgatttaactgcttctgctttaattgaaacatttaactctgtagcatttagagatgttagtatggctggaaatattataataccagctactactataaaaggttttgctagaacaatgattgaggaaaattcaatcaatattaaaaaaaatattagagaaaatttgcaggaatcaatattatatttccctacttatagaaggattgaagaagaactaaaaaatttaggtaatgaagaattaaattttggtaaagaggataagcgattaattcagtttggaatggacgatgtaattgcaaaatttgatagaattgaaaaaaatatcaaagatgcaactttagaattattaccaaaagtaaatggtgaaatgttaactcagtttgttgaagttactacaccaactcaagaaatgagggatagtatccaacctgaaaccttaaatatagtattaaatagaataggaaataacatacctgaaaatgataaaaacaaaatagaagaactggttaattcaggaaaaataaaatctcccgaatataatcaattagtttattatttatctaaactgcttggcttatatgagccacaaagagaaaaagatcattcgattaaaaaatttgccgaagtttgtaataaatatctacataaaaaacgtattgtctatgatgaaacaagtgtaaaaatttccatagtccaagaaataaataatcaaccaatagatattagaaatttatcctctggtgaaaaacaaattatatccttgttttctaaaatttatcttgactcagatgatgaatacataattttgtttgatgaacctgaactttctctttccctggaatggcaaagattattactacctgatatcttgaaatctggtaaatgtaaactgcttttagctgtcacacattcaccattcatttttgataatgagttagatacaaatgcaatagatttagatgattttgtcacggaaaaatagaaagaactaaatttaaagcaaaatcacctgtgttcacaagatcgtcaaaaaagttttagaggtaaatttgaaatttattttttattcaaaattatgcaaaaactaattgaagaagcaaataaaggcaatcccaagtattttactaaaaaaataaaagtcaccttaaatttgcgggaaacaacactaatttctaatttgtcccaatatgcggacaccccagattgtctagtaagttatttggaatcttttagaacttctgtgaattaaaattatcataacactttgcgcgaaacctgaatctatagtattttattaattgtaattaaccaaatttaggaaaattaatcatgctatatcacttagattttcacgttgaataccccgacgacatgacacagcaagaactctttaccatttggagtgaagaagcagatgcagcactacaagcaaagcaagcaggaattgttgtagatttgtggaaatgtgtgggaactcgtcgagtaattgttattgttgatgttcccacacctgacacactggatcaaattctcttagatttacctatcatgaaaaaaatgggtcaaaatgtacaagtagaagtaactcctttgagaagatatgaagactttgcagcagatgtaaaatctcggttagagaaaaaataaacataaagcaaaggtaagcattcagccatcagctatcagctttcagtagtcagattttgcaagcgttgaataaaacccacaatttgcaaacattctgactcctgtacaggcgtttgcgaagcgtgctggaagcatcagcattcgggcaacaaattatcaattttatcaacaagctattttcctgtaagggcgaagcattcgggcaacaaattatcaattttatcaacaagctattttcctgtaagggcgaagcattcgggcaacaaattatcaattttatcaacaagctattttccgaatgcttcgcccctacttctgatcaaatttagtatttaatactgggaaaaatgaggatgtctatcatctcaccaacagctaaacctgagatagcaataaatgttaaaatccaaaaagaatatgttttgctaaatccagaaaaacgcatttctaaatcagctaacaacgtggttgctaatgggataagaaatatgctgaataaaattgaccaaattgctattaaagcgatggatgcactgagaaccaagacgacaactaaagtttgagaaccaaaaactaaaagattttctaaccaagaattactttttctgactatagctatagcgatcgccgccacaaaagctcctactaaccaaacaatctgatgcgctgctaaataccatcctagcagattgtaagccagccaaagtaatactaatgcagttacaggaatcctttggaaaaatagcaagttcatatttcccgatcctataattaggggttgctgagaaagtctttccgtgagggcataggagtcaggagtcaggagtcaggaggagatttgaaaatttctttgccatctcttgaaatcccaaaaaatgcacactttttccggtatacccttcaaaacccttgcactaatttctgtgtttatcagcctctaacctttgatatatcaaggttttaggtttattcagcaagccctaattattttaacatcaatttaattgaccaagagattatttgtctaattcaaatagacaatttttgacattattcctctatccccagaattattttaacactctctccctacggctgcattaatttaattaatttgtaatttttgtcaatttcttaccttggatatacattcagatatttacaagcaaacctatcgacagagatagccaaggttttattttgttacacctataattgaataaataatctaatttttcacaaattgctgagaaagcgtattatatagagcaggtaaataatatgtatattgaagacatattacaacatcaggtagataaggtagcgttaaataaaacctttcatggtttaacacaaaccgaaagtcaaaaggaatacgcacaacaggaaggattaaacatctccgatttagcaatagctttaagtccactcagctttgtatttatttgggcaatttttctgtttattgtccaaaaacttcgttctcatgcagacaataaaatagcttttagtgtcaatagtttacatcaagttccctgtaaaaactgtaaatttttctcaaataaccattatttgaagtgtgcagtgagacctgatatagttctcacagaagaagctatgaattgttctgaatactgccccaaaaaaggaaaatttacaccaaacaaactatttagatagggtgaaaaaaaagtctttgactttttcagcaaaccctacttatttcctccagcaagacagccctctgcctcctgcctcctaactactgactcttgttatattttgctattaacttcttgacttgagcggccacaagtggatgggagtctgtttgcaaatggggtagaatttcttgcagcactcgctgggaaaccacactcaagtatgaaatcactgcttctctgacaaaacctgtaggatggcgcaaatttgtcaaaatttccgtcgttgtcagtcgcacgtaagcagcttgagcaaaatgaaaacagcaagctaaacaccagtcagagagcaaatttccctggttgataagtttacggatgcgctcattaatggaaatattttcatattgccaaaatcccccatcgacaagatacttgagtttttctgcttctggtcttcgatctaaaatattcagcaatagagacttacaaggtaaatttacagtgtggtctaaaatttccaatccccttgctaaatttatcaatgattgagattggagattaaaagctgctgcctgcatcttttctgctgggtaaagcagtttcaataacaacaataatctgtctctggcatctaactctaattctagaagtgagcgttgtagcaactgggcaatagtgacaagcctttcattgccatgataattttctaaagactccaaattatgaaagtctatataggctgcataaatttcacccagaaatcctaattcttgctcaattaacgcttctactcgactttcagagaatttatctataacattgctcttgtctgggtgttggtaaattttcagcaagctgcggagaatatgttccctgctagtacccgtggatgtttccaagtttagccataaagtttctattgcttctactgtatcgatttgagcaatggtacgccaagcgtacattctcactacttcgggtttataaacattcgtagccagttttaataacatgggtatggcttcattttccatactcactaaacattgcatagctgttatgcgagtggatttataatatagtgcggctaagagtgtgggatagtattcttccatgccagtagcagtaatcatttctaaaaccgcacagcgtactcgtaatgattcatcttgtaataaattgggaatgtgaacccgcaaagcctgtaaataaaccacttctctgagcgccctgactccgttgatcctttcttgttcttgtttatgggtgagcattcgtcgtagagttttcgtagctgcggcctgttgcatcggtgtaccttgacgcaatagcaaggctgctgctgtggcacggatcagtgaatggtttggtggttctatgtaaggttctaagagacttatattcagattctcttctgctaaccaaacataacgcatagccaaagcaaagacttctggatctagggtggcttgaggctgatccaataagcggcgaacttccggcacgtacaggggctttgctccactcagcaacataatttctaggctggacttttgcaaatctgaaggtaatttcactagcaatggtgctaaaacttgtccggcaccggggagatcgatttgggctaaaacttctaaacaagagtgtttatcggtgttgctgcctttttctactaaagctttgatgatgccctgtttgaaggcgcgtaaaccaacagtatttgtacttaatcctacccgttcagcacttaaaactaagacatcaacatagcgcgatcgcaattcccacacgacttttaaacaggtagctgccactatgacggtttcaccgattaatacccatttttttagtccttgaggtacaaattgatcaatgatgtgtatgctgccaaaaatggttaaccctgttaaaccagaggcgatcgcttcggctgtaccactggataatgcctgcatccggctacgaatcctctcaggaataggttgataaagtgctggaccactactaataacaaaggtatagcgtagcagttcatcacagaatttgagactgattaaaccccaaaaaaatccaggttcttcgatagctggaaataatcccaaaaatgaaatggcccctggtaataaaaagcctacagtcagtggtaaaagtgctgctgtgaaaaacacccctaatttttcaatcaagcggctggaaataaaccactgagtagttaattcacacattcccaccagcccaccaaatacacctaagaagctggccagttgttgttcgcctaaactagaattgagttcccgcaaatactgaaaatctattaacaagccgatggcttgcaacagcgcaaaaaaggcgaataattgccaaacatagcgttttagaggtgtttctaggcggcgatgtcgagatgcttgttcttcggtaatttctcgttgaggagtgtaggggaaagcagaaggatatttataagttaaataaaataaaattcctgagcctaataagatgacaatacaagcgatgagaatgactttattcaggttggcaaatcgcagtaaaattggcaaactaaacccactaatcacatcggctactaatatgccactactgactaatgggtaagtgcgtttaatttcccgaatgttaaataattgattggcaacaattgaggtgttaaggtcattaactacataacaagcatctacccacaaccggagcagaaacacaataattattgccaagtagggattatttacaccaccatacaagaatactaatagaaataatggcatcaccatccctggtgcgatcgccactattaccgcacgcaagggaaataccttttgtaaccaagaatataaaactaccagtacaacacctgtgactgcactagcaatataaatccagggtagttgtcccgcgccatatttatccaaaaacagtgcgacagtgctatcctcagcccagcgcaaccctacagatacaattgtgtagaaggcaaacatcatccaagtacgttcaagctcctctggtcggagattgaccaacttcagcattcgtgctaaaaagcctctatcgcttgttaaccagtgattttttaattccatgcagttttttctggggtaagaaataggtaatcacaatgcaacagctaagtagggtttgctgaaaaagttatctgtgaaagctaggtgacaggtgacaggtgctacgccacggtgacagtttcaaaagttggataggaacgattttttctttaagtaggaattaagtgcaaggtttttcagttgccacctcataaaatctcgcactttttgaaagcacttcggcttacttcgacaccgcccttcgacaccgcccttcgacaccgcccttcgacaccgcccttcgacaccgcccttcgacaccgcccttcgacaccgcccttcgacaccgcccttcgacaccgcccttcgacaccgcccttcgacacc

SEQ ID NO: 86 - DNA, 19749 bp, Sphaerospermopsis sp. LEGE 00249
  LEGE00249_104
gactggtgactggtgactggtgactggggactggtgactggggactggggactggtgactggtgactggtgactggtgactggtgactggggactggtgactggggactggggactggtgactggtgactgggtaatcacttttatgttttttaatcagcttccctattccctattccctattccctattccctattccctattccctattccctattccctattccctattccctatttagtatatgaattactggttaatgaaatctgaaccttctgtctatagtattcttgatttacaaactcaaaaacaaactatttgggatggtgtgcggaattatcaagcacggaattttttaaagcaaatgcaaataggagatttggcttttttctatcattctaatgctgaacctccaggaattttcggtttgatgaaaatagtagaaactggtattgctgatccaactcaatttgatactaatagtaaatattatgatcctaagtctactcctgaatctccccggtggttaactgtaaaggtagagtttgccgaggtattttctcaaccgatttttttatctacacttaaagaaaaatttacgggagatgaattattagtagttaaaaaaggtaatcgtttatcagtaatttctgtaggagaatctgtagcaaaaaatattttagccatgaataattaattatgcaaaaaatagtttataattgaagtacaactaaattgttgttaagaaattagaccttatacagacaaaatttttaggcaatatataggcatataggcaatatattttatgctcaacggaccactacatgaacaaccgcgcaaccaaagagctacagtaattcgtaccagtaatgaatttatactgctggaatggttaaaatcaactggtcgtctaatagcgcgtgaacatatagaatctgacctgaccagtgacgttgaagaagaaatttccgagattatcgacctcgacgatctggcttatgataatgatgatgatacaggtttagatttggaagactaggtttgtcataaaatcacgcaaagataccaataaacttatttgagtcttttttgagtcttttttgagtctttgcgtttaccctggggatatcctgacagaaattgcgtaagcttttaatctttttttaatttttttttaatctttaatcaactgctgcaaagctgcaaataaatcctttgttaaatcactcacaccttttctagcagcttgtttatttccctgacatttttcccatctttctgttacggaaatcggttcaccgacagtaatcatcgcttgttttaaacctaaacgtggtcttcctggtaaagtcgaatctttaattctcgacaacatatcaaacattaataaagttgtttctgcaaatctatcagcggttggtttttcttgaatataattagctgtcaccgctacaaaactttcggctattctcatgtgttgcattcgcaaatctgcttcttctgctacccagtcagccagaccacgtttaaaaggtggtaaactataaatatcctcgatatcatcacgataaatataattccaacctgcttcttctaagcgccgacatctatcaataaaattaccttgtgccgtcacattaaaatattcttcagccacctgtaaagctgtatccattaaatttcctaacctattaattaaaacctgattagggttagctgtttcttcaccaataattactggtaaatctcgatgataaaaacgccgataaaagtcttccatttccgtaattaaatattctgctaaacgaaaaagtcgctgacataaaatttcttccctattcttgccagtgtaactaatttctgccactggtaaaccactatcagcttctaattttgatattagccattctattttttcccaaggtgggttaacataactatatttaataccaataggaataataaaaaccgtttctgggcggttagctttttgcaaatcttccacacaccaaaaacttatttgtgctacaccaggttctaaaggactgactattccactatgaccatttgtaccaccttcaggagcgatcgcaataggcatttctgcattcacaaataaatttcttaccatttgaatcgcatttctatctacttttcttcccctacgaactggtacaccaccgcagcgagaaaataaccatcctaaccaatttcccgcccataaagtcatgcctctttcatacataaaatgactatgaacaggatattttaaatcaatgcctttttcccgcgctaccttgggaacaatgcgagaaagcaaatatagcattgttaaaggatcttcaacttctggatgacgaaaagcaattaaaaatctaattttaccctcttgaaattcatgatataatttagctaacacttcggcgttttcagcttctatgttcacaataccagcaggtagccaaggtctagttctcacccgtaaaataaaagggagaaaaaaagacatcaccttgagtaccaacggttgaaaatttgggggaataaattttaatggtggttgggtggaatgaatagatttaggcaactttttctcctgtagtgtggtaaaacataaaacaatatgagtgagtattgcaaatagtaatttatccaggttatgaaataaacaaaccgcaaagtacgcaaagtacacaaagggaagagaatggataaggggttttttatccatgctatgattttagcaaagttggatgctcacaaattatgtaaatagaaagcgaagatcgcaattatcataattttatgtgattatacaaatatgtaaaactacaaaaaataaaacttctgaaattatctgcgtttatctgcgttcatctgcgtttcctaaaaactcaaaaatatgcacacaaccccagaacaaaaacaatttgcacccgcaacccaacgcaaccgcgaacccattttagaggtacttcaacaagtcttacccacaacaggaacaattttagaaatagccagtggtacaggagaacacgcggtattttttgcacctcatctagcaccgcgaaaatggctaccttctgacccaaaccccctgttaagagacagtatcacagcttggatggcagaatgtaaaagtgattatatttacccacctttagatatagatgtacagttacccgtctggccagttgagaaagaaacatttacagactcgccaatagttgctatagtcaatattaatatgattcatatttccccttggtcagcttgttcaggactgatggccggggctggacgaattttaccgccagatggtatcctttatttatacggaccttataaacaaaagggtcaacataccgcacccagtaacgctgcttttgatgagtctttgcgatcgcaaaacccagcttggggagtgcgtaatttagaagatgtggtagaagcagcaaaagctgaaaatttgacattgcagaaaatttaccaaatgccagcaaataatttatcagttgtcttccaaaaaacctagatggaggttagcggactcgaaccgctgacatcctgcttgcaaagcaggcgctctaccaactgagctaaacccccgtttttcaagtcaaaattcaaaattaaacaagttcctctttttcagaaacgagttaactttaaacttaaagtaaataatatcctattattctttttttgtaaacagatgaacccagaaaataaccaagaaaatattatagttgtagctgcgctgtataaatttgtcagtttacccgatgatcaagaactgcaagcaccgctgttatctttttgtcagcaacaaggcatcaaaggcacaattttactagccaaagaaggcattaacgggactatagctggttctcgttttgcgattgatgcggttttggggtttctgcgtagtgatgcgcggttagcagacttagaacacaaagaatcatacaccgacacaccgccatttgaaaagatgaaagtgcggttaaaacgcgaaattgttacattaggaataccggaagttgacccaaatgaaaaggtaggaaactacgtcactccaaaggaatggaatgatttgatttctgatccagaagtaacagtagttgatacccgtaatgattatgaagttagtataggaactttcaaaagggcaaaaaatccccaaacgcagattttccgagattttcctgaatatgtaagtaaaaacttagacccgaacaaacataaaaaagttgccttattctgtactggtggtattcgctgcgaaaaagccacatcttatatgctggctcaaggttttgaggaagtttatcatctcaaagggggtattctgaaatacttagaagaagtccccaaagaagaaagtttatgggaaggggaatgttttgtatttgatgaacgggttgcggtgcgtcacggattggaagagggcagttatgagttatgcttctgttgtggacatcccattgctgaggctgataaaacttcacctaagtatgaagaaggtatttcttgtcctcactgttttgatagtttgacggaggaaaaaagagcaagacagcaggagaagtggaagcaatataagttacagaatttttaaagctcacacagagtcgcagagataaaacctctttcctttgcgtactttgcggttcgttattcataaattttttaaatctcaaaaatccaaaaatttttcaactctctttttttcgcaataacaagcctctattctcaatattattgataatattatcagtaattttacgaagatcggttatttcagccattgatattgacatactctttttttctggtatgatgtatatataatccaagggagttgtatgtcaagctttagttgctcttggatgtgagtattttgtcaaataatgtaatttttgttccgtttactgcaatttttccctcttgagtgagtttataaaaagcgcgagaaagagtttcaggaacagtacctaataaagcagctaattgggttttgggtaagtctaattcgacaacgttaatattaccgtttttctgacttaattttaatagataattggttaatctttctggaacttcttggaaagaaagagcattaaccaagtgggttaaatgcctgagatgtcgtgcaaaagttcctaacattgctattgctaaagtggggtgttgttgtaaaaccatgaaaaatgaagttctgggaataaacacaacttccgaaatttctattgctgctgcggatgcggggaagtttcccccatcaaaagcgggaacttctgcaaagtattctgatatttcaaagatgtgtaatatttgttctttaccgtggtttgctactttaaatactttgattttaccagatttaacaataaaaagtcccgttgctgcgtctccttcccaaaatagggtttcgttttttttgtatgtttggagaatagcaatattagcaactgcttggagttgttcatcaatgatgttttcaaagatgggggtttggtggaggaagtttttgacttctaggactttttcagtgagggacataaggattattctcgttcatgtttttattattgtaaagccaaatcaattgaatactttagtctgtagcactttagtctacaatagcttagtatttttctatgcaaacaagtaaactagatcaaaaattaggatcagaaatacaacgtcgtcgtttagaaaaaggttggtcacaagagtatctagcagaagttacaggtctacatagaacttatattagccaactagaacgaggattaaaaagcccttctgtaagagttttaagtcatattaccaaggctttaaatgtaaccatgggtgaatttttgcatgctgtagaggaatcgttaagtgttgacaaataatgagattgagagattaaaacaagctattattgctacagttgcatccccagtaattgggtcaatagaagattatgcttgggaagctatttttcattatgttaaagatattccgttaacagatccagctttaggacgcagtaaacttttatatgatgcagttgatattgtaactaaaacaggttggtcattgaaatctctccaacttagtaatttaaaaattggcagtacatttttctttgtgattcaaagagcagatattatcagtaaagctgatcaacttgggtttcctggtttgacagaattatctccaccagaagaactaggtgcagctattattcaacattggaatgagaaattaatcacaaatcaatcattacaaggagttgaaaatagttatgaaagcatactgctgaaaaccattaaaggtaatgaatatgtttattgtgaatatcctttatatccacttgatccaactatttttaattgggcttggacagtaaacaagaaaactggtaaaagtggtgcaggtttacaaggaagtgtaggagataacgttgatttagtttggtataaaaatcaaaaacaactttttaaagcgagaattattccagaagcagcagtgaggataaatattcaaagaactcgtcttaacccagagaattatgttaagaaaattctggcagctttagaaatgcaaaactcctaaatatcactctatataatacactcagctatagttttagctaataatggaggtacagattcaccaatttgagaagccatttctgtatatgttcctaaaaagtgaaaagtatctggataagaatgaagtcgggcagcttcgcgtatggtaatggttctattttgtgtgggatgaaaaaatcttccagaacccggatgaaaaacccatcttgtaattgtttttgctggttgatcccaataaagtctgccataagcaccgctataatgttttttaggtgctaattctggaggtaaatttctggcatcttgtccttcttttaacagttttactcttgacatttgaattgggcttaaagcacgagcgatatggtttgtaattttggtgctgttgtgtctgattaaagattgataagttgtttgtggttctgaaggatatttttcttcagcatatttttctccggcatttagttccggtaaatctccaatagcatctttaacagtaacaaggctggaattagattttaatagattagtttggtaagggtatttttcatctttatgctgactctgaatatcattatgtgtaggatgaggcatgataattgaacgatctaaactagcaataaaaaaagctctggctcttgtttgaggaactccatagttagcagcattcaaagatgatgatataactttataccccaataattcaagttgatttgtaatttgatatttgaataaacctttatatgctgtcaaaatttcaggaacgttttccataataacgtaaagaggtctaaactcttggacaaaagctaagaaagttttatataattgatttcttggatcgtccatataacgatattcagcaggtatattcctagaaaatccctgacaaggaggaccgccaataattgcgtttagttcttcttttcttaaacctaaatattcacgcagttctaaaggattaacttctcgaatatcttgatgtatcactttagtatttgggaagttatgttgataggtagctaaagcttttttgttggtatcaatagcacataacgcttcaaagccagctagttgaaagcctgtgcttaaaccacctgcgccagcgaataagtcaataattttattgttcattcttgaatactatagtattcgccaattaatgtcaagtggtttgtatttcaataattgtaggacttacgcaactggcatatttctctgttcgtagtaagcgatttatcgcttatttttggcactaaagtgcctactacagacttaaatttagactttccttgtgacacttgcgtaagtcctgaattgttggttaacgtcaacacaatcaaacaaaactttaccaaactttaccaagacacttgacttaaatcaaggctatcctcaatcgcaatcactacactgtaagcatcaagagttgaggaacgaattatgttctgtaaccaatgtgaacaaaccacccgtggagatgtctgtcatcagtggggtgcgtgtggtaaaagtcccgaagtagatgctttacaagatttattagtacattgtttacgcggactttcccaaatagcattacaagcaaaatctttaggtattaatactcgtgacaccgatgagtttacctgtgaaatgctattttccacattaaccaatgtgaattttacaacttctgattttatcgcttttgtgaatcgggcgatcgcagttcgtgaaagtctcaaattaaaaattcaagcattgggtaataaagttgttgtttcaactatcaatagttttaaccctgcaattagtttaacagatcaaattcaacaaggtaaaaatttagaatttgaatttatcagtcaatctgcaaataacgttgatattttctctctcaaacttacagtattatatggtttaaaaggtttagctgcttacgctttccatgctttagaattaaatcagcatgatgaaagtttatatacattctgtcatgaagtgttggctaatttagatgaccaagataaaactttacaagattggttaaacttagctttaaaagttggggaaatgaacttaaaagcaatgcagcttttagacgcaggaaatactgaaacctttggacatcctacacccacacctgtaaatttaggacatataaaaggaaaagcaattctcgtttctggacatgatttattagcattaaaagctattttagaagcaactgcaggaacagaaattaaagtttacactcatggggaattattaccagcgcatggttatccaaaattaaaagcaaaatacccccatctttatggacattatggtacagcatggcaaaatcaaacccatgaatttgaacattttcctggtgcgatcgccatgactaccaattgtcttgtaccaccccatgaaacttacaaaaacaaagtatttacattaggtccagtgggttatcctggtttacaacatttgagtatttctgatgtttcacccatcattaataaagccttagaactaccaggttttacagatgaagaaaacaaaggaatagtaaccacaggttttgccagaaatgcagttttaggagttgcagaaacagtaattgatgctgtaaaatcaggagacatcaaacacttctttttagtaggtggttgtgatggtgcaaaaccaggcagaaactactacagcgacttagtagaacaagttcctaatgattgtgtagtcttaacattaggttgtggaaaattccgcttttttgataaacaattaggtgatattggcggtattcccagattattagatgtgggacaatgtaatgatgcttattcagcaattcaaattgccgtagctttagcaaatgcctttgaagtaggagtgaatgaactaccattatcaatgataatatcatggtatgaacaaaaggcgatcgccgttttactaaccttacttcatttaggtattcaaaatattcgcatcggtctaacccttcccgcattcctatcagcaaacgtcatcaaactactatcagaaacctatcatttacaactcatcaccacaccagaaaaagacctagcagagtgtcttagttaaacctagaaataaaataaaaataagcccccctaaaaaaggggggttagggtgatatttgatattaccaattacctattctatcctcatcccaaacttctaactttaactcttgcagataacttaaaccattagaaatttgcgtttcagttccctgtaaatctaaatcaaaccaaccatcactaatagcatcctgacctaaaaaagcagctttgatattgatagttaaaccataatcagaaaccagacgagaaataacaggttcttgatgataatccttggtaattctcaccctaattctctgacttgtcaacagatttttctcactcataaaaacccccaaaaaataaaattaacaccccaaaaaccctcttaaacctcttctcttcgtgtcctttgcgtacttcgtggttcgttcaaaacaacaacttaatatttaacgaaccgcaaagaacgcaaagagcgcaaagtaagaattattccacatccttaatacgagttttcctctccaaaacttccttcacaaccaaagttaccaccgccaaaagtgccaacaaaaccgctgccgaaaaagctgcttccgtctcatattgcttataggcatcttccacaaacaaaggcaaactttgggtcttactcgctatgtttccagacaccacagaaactgccccaaattcacccatagctctggcatttgttaaaattaaaccatagagtaaaccccaacgaatactaggtaaagtcacacgccaaaaagtttgccactcatttgcacccaaagttttcgctgcttcttccgggtctttcccaaactcttccaaaaccggaataacttccctagcaacaaaaggcatactcacaaaagaagtagctaaaaccattcctggaaaagcaaaaatgatttgaatatcatgactttgcagccaaggaccaaaccaaccttgtctaccatagagtaaaacaatcatcaaacctgcaacaactggagagatagaaaaaggcaggtctatgatactcaaaactatagcacgaccagggaatttatggcgagcgatcgcccaagctgcacacaaaccaaaaacagtattgataggtatagaaatcaccgctaataataaagttaaccaagcagcatggagaaagtctattctggctaagttctcaaaaaatggtccaattccctttttaaaggcttggtaaaaaacattaatagttgggatatactgcaccagaaataaataagcaacagctatcccaattaaaacccctggaacccaactttgttttggtttacctgttgtcatatcttcttgcccaagcttgtaataaattaattgctaagagtaaaactagagaaattgccaataaaacaacccctatcaccgttgcacctgaataatcatattgttctaaacgttggaaaattaacactggtgcaattaaatcttgaaacggtgtgttagaagcaataattaccgtcgaaccatactcacccactgcacgggaaaaacccaaagcaataccagttaaaattgtgggaaataaaggcggtaaaatcacctttgtaaaagttgtccactgagaagcgcccaaactccaagctacttcttcaagttccttttccatctcttgcaatacaggttgtacagtcctcaccacaaacggcaaagatatataaatcatcgctacacctacacctaagcgagtaaaagaaacttttatacctaaaggtgcaagtaaagaacctatccaaccattatcactgtacacggtagctaaagttaaacctgctaccgatgtcggcaaagcaaagggtaaatctacggtagcatcaaaaattcgctttaaagggaaatcgtaccgcaccaaaacccaagcaatcaatgtaccaaatataccattaacagcagcagccaaaaatgaagttacaaaagttacattataagttgctaatgctaattcactggtagcaatttcccaaaactttgcaggtggttctgtactagctttgaaaaacatagccgcaataggcagaaacaacatgaaagctaggtataaaattgtaattcgccaagtccaaggtagacgaattactttatctaaaaacaccttgacaacagaaggttttttctcagtttgcaaacttgtagatacagccataattcaaacttcaacagtttcaacaattaccaatcaccaattatctttttttagcttgaatttgatcaaataatgccccatcatcaaaaaactttttctgcacagtatcccaaccacctaaatcttcaactgtacccaaagttttcacagggggatatttatcagcaaattccttagttttagctacggtttcatccacaggacgaaaaccaactttagcaaattctgtttgcgcttcaggagtaaataggtactgaacaaaagcctccactacttccctatttccatgtttatcaacattcttatccacaatcgcaacaggattatcaatagaaacattcacatcaggaaccacataatttaccttcactcccttttcttgtgccaagacaatttcattttcataattaatcaaagcatcaccctgactttgtttaaaaaatgcgtctgtagcttcacgtgcatccctagttaaaataggaacgttattgtaaaccttggtaacaaactctatcgctttagcctcatcgcctccagttttaattgcagagttccacaaagccacgaaattccaacgcgccacaccagatgttttcggatcggcagtaattacttttacaccatctttagctaaatctgcccaggttttgattcctttaggattaccttcacgagtcactaaagcagctacagacttagaaacaatagcattattaggagcttccttttcccatcctggctgaattaaacccgctttttcaattttttgggtatccaaagccaatgctaaatgaacaatatcagcctctaatccatcaataacagcccgtgtttgcgaacctgaaccgccataactttgtttaaatgtcaccttttgtccatgttctttttgccatttttccacaaacttaggaattatcgcttcgtgggctgttttcgtcacagcaaaagagactagggtaatttctacatctttctttttagcatctgtagaagttggattttgagtattactctcattcccactactacaagcagcaagtgccacactcaaaaatgctcctgctaaaaacagggatagaaaactttttaccgattttatacgtaaccgtggacgctgccaccaactcatactctgttctcctggaaatctgaattgtggataaacttcactttcacgatagggaatatggggattgtagcagatttgagggaaatatatttttgatcacctcatgatcacatcaaaataactcccaactttggatatatttataactttatgttatcaaacacgcataatttattataaaaataaatacacgcttttttcgatagatattttgtactttatatcttgattttcgcgatcgcatctgatacgctctgtttttgtaagcaaattacagttagtctatcaaattaccgtagattatttgaataccacaggaacaccttttatgacatacaaatccgaaaaatcagcgaaactcctgcctgtaaaaacagcatcaaccgtcttgttagcaatcagtgtcagtgcaactacggcatttcctgtatttgcaagaactacagcccaaaataaacaactaattagtcaaaatactcaaaaagtagaaattaccttggtgacttatgcagtaacaaaagctgcttacagtaaaatcattccgcagtttgtagccaaatggaaacgagaaaaaggtcaggatgtcgtcattcgcgaaagttatggtggttcaggttctcaaacccgtgctgtcattgatggtttaccagccgatgtagtagcattagccctagccttggataccaaaaaaatcgaacaagcaggtttaattaaccgtggttgggaaaaagaagcgcccaacaactcaataattacccgctcagtggtagcattagaaacacgtccaggtaatcctaaaggcatcaaaacctggaatgatttaatcaaaccgggagtaaaaatagtcacagctaaccccaagacatctggtggtgcaaggtggaattttttggctttgtggggtgcaataacacaaaacggaggcaacgaaacccaagcattaaactttgtgcaacaagtatttagaaatgtagtagtattacccaaagatgccagagaatcaagtgacgcttttttcaaaaaaaatcaaggtgatgtactaatcaactatgagaacgaagtaattttagcagcacaacaaggaaaaacagatacatcttatgtagtaccttccacgaatatttccattgaaggacctgtagcagtagttgataaaaatgtagataaacgcggtactcgtgaagtatcagaagcatttgtcaagtttttatttacaccagaagcccagagagaatttgccaaagttggttttagaccagttaacccaactgtaaccaaagaagtacaaaataaatttcccagaatcagcaaactttatacagtcggtactttaggtggttgggatgctgtgcagaagaaattttttgatgatggtgctatttttgataaaattcaatctagaaagagatagggaacagggaatagggaatagggaataggaaatagaaggcaaaaggcaaaagttatattctttcctgaacttctgaactcctgaacttctgaactcctaaattagacttctccgaaaaagatgtagggacaattcatgaattgtccctacgaatgggtttcaggttatgcttatgtcattttcggagatgtctatttaaaaaaatctctgccaaaatccccacaatttgataccctagcttaaacagatttgagaaaaatgaaagagtggaaattcaacttgggcggggaaaaatggctcgccgagcctacggcattgacgaaatagctttagtccccggtaacagaacattagatccgagtctagcggatacaaagtggaaaattggtaatattgaacgagaaatacccattattgctagtgcaatggatggtgtagtagatgttggtatggcggtgcgtctatcccagttaggagctttaggagttcttaacctagagggtattcaaacgcgatatgatgacccaaatccgatattagatcgcattgcttcagtgggcaaagatgaatttgtgggactgatgcaagaactttatgccgaaccgatcaagcccaaactcattgaaaaacgtattcaggaaattaaacaacaaggcggtattgcggcagttagtgcaacaccagtaggagcaagcaaatatggtgaagtagtagctaaagctggggctgatttattttttatccaagctacagtagtttctacagatcacctttctccagagtctattaaacctttagacttagcacagttttgccagtctatgcctattcccgtagttttgggtaactgcgttacatatcaagtcaccttgcatttaatgaaagcaggtgcatccgcagtgttagtagggattggacccggtgcagcttgtacatcccgtggggttttaggtgtgggtataccccaagccacagcagttgccgactgtgccgctgccagagatgacttttatcaagaaacgggcaaatatgtacctgtcattgccgatggtggtttaatcaccggtggcgacatttgtaaatgtattgcttgcggtgctgatggcgtaatgattggttcaccctttgccagagccgcagaagccccaggacggggttatcattggggaatggcaactcctagcccagtgctgccccgtggtactcgtattcgtgtgggtacaactggaactctagaacaaatactcagaggtccagcagcattagatgatggtactcacaacctgcttggcgcattaaaaaccagcatgggtacattaggagcaaaagacctaaaagaaatgcagcaagtagaagtagttattgctccctctctgttgacagaaggcaaagtttaccaaaaagcccaacagttgggtatgggtaaataaataggtgattggtgattggtgactggtgactggtgactggggactggtgactggggactggggactggtgactggtgactggtgactgggaagactaatatgttacttcctattccctgtcccctgttccctgttccctgttccctcaaacaaaaattttttcccagcaaacctaaacaatcactggaaaaatcccaactgtagcctacaatagaaatagcggagacaaatgtttccgttcactcctcacaccacactccgcccggactactgttcgggcggttccttataattatccataaattccatagcttctttgcaaatgtacatccttcactcccaagctgatgtttttgctatggtagaattttcactaaactcataaatataataggcaaaggttgttaggaatgtcagcagcagcacaagttacagattctagttttaagcaggaagtgctagatagcgaagtacccgttttagttgacttctgggctccctggtgcggtccttgtcgcatggtggctcctgtggttgaggaaatcgccagtcagtatgaaggtcaagtcaaagtagtgaaagttaatactgatgaaaatcctcaagttgctagtcagtatggcatccgcagcattcccacattaatgatttttaaaggtggacaaaaagtggatatggtagttggtgctgtgcctaaaactacattatctcaaactttggaaaaacatctttaaacctcaactgcttacaaatttaattgatttgtcgtgttttaggtaaatatttgttaattggtttctgaggcgcaaagtttgcgtctccagaaaactttctgcacaacaagccagacaatttgcaattgatgatttttggggaaaccggaaaaatcttgaccctatgaccacctaaattatacaaaccccttttgggtaaatgtttccgcttgcggcagcgtaggtagttcacataaaatataatgccattgttgtggcagttctcatgacctctcaagagtcctttgaaatactagagtccctccaagctgatattgctgagttaatagatcgtctaccgaccttaaaacatcggcaatttatccagcaggcacttgctactatagttcgtttagctgatagtgaaattgatcgtcttgattggaagatactatctgcggctttagcagatatggaaagaggcttccaactcttttatgattatcgacacactcgcaaagttactatctttggttctgctcgtttagcaccagaaacccctgattaccaaatggcagttcaatttgctcgcgctgtatctcaactaggatttatggtgatgacaggtggtggtggtggtatcatgcaagctggccaagaaggtgcaggaagaaacaattcttttggtttaaatattcagttaccttttgagcaacaggctaacccttttattgaaggtgatcctaaactcattcactttaaatatttctttacccgcaaactctttttgctcaaagaaagtgatgctgtagctttgtttcccggtggctttggcactcaagatgaagcttttgaatgtatgacattaagccaaacaggtaaattcggtcctgttcctgtggttctcatcgatcctcctggtggtgattattggcactcttggagtaaatatattgatgaccaattggtggcaaaaggtcttgtgagtccagaagatcctagtctgtacacagttacagataatctagaggtggcttgcaatgccattacccgtttttaccaagtttatcactccagccgctacgtaggtgatctattggtgattcgtctcagacacgagttatcaaatgaattggtggaacaattaaatactgaatttaaagacattctggttcaaggcaaaattgaaaaaagtcaggtattacctcaagaaggtcaagatgaaacctctgatttaccccgccttattttatacttcaatcaaagagatttggggcgtttgtatcagatgattgcagcgattaataagttaggtattcctaccccagaggaaacagcccatccagaaagaaagtaatttggtgattggtgattggtgattggtgattggggacacttcgacaagctcagtgcatcgctggggactggtgattggataaaaataactaataactaataactaatgactaatgactaataactaatgattgagttttcctggtggcaagttttccagatagtaagcgcgttgcataaatgcgggatgaattggcgtttgaaaccgttgaaaattcgttctaaattgggcgaaatcatcccatgattcagcaacgccatagtaagaagtggaattaaaaggcataataggccaacactgcaaacaattattagatatctgaaaaaagatagaggaattaaatatgctggaattattaggttcaggtttggtttcactttggctcgatatggctggagtcaaaatccaacctgtaaatgctttacaagcattggcttggcaaagtagtcctggctttgttattgcacctgatcccaacccagccggagctatgacagtacaggaatatctcaaggagttgatgacttctaagctggtaacggaaaatctgatccagcaacagggagtttggttgcagtcgggtccgatgttaatggctaatcaccaaggtacaattcctctacccgcagcatctttaactaaggtggccacttcattagcaacttttaaaattttgggaccaaaccatcaatttgaaactttgattagtgctacaggtcctatagttaatggggtagtacagggtgatttggtgattactgctggtggtgatccgatgtttgtcggagaggaagcgatcgctgttggtaatgctctcaataaaatcggtattaagcaagtcaagggaaatttggtaattactggcaattttgccatgaatttctatactaatcctaccgcagcaggtcaattactcaaacaagctttaaaccacaaaagttggaatcgttctgtaatttaccaatattcccgaatgcccaagggaacacctaaaccccaagtagtaattaatggtacggtgcaggtgacagcacaacctaaccctaaacaaactttactggtacgtcatctttctttacccctacatcaactcattaaagagatgaatgtttacagtaacaacgacatagctgagatgttagctcaatcagtgggaggggcaaatgtagttaaatctactgctgctcaactagctatggttccacagtcggaaattcaattaattaatggttctggtttaggaagagaaaataaaatttcccctagagccgtctgtgctatgtttatggcactacaacgccaagcatccgcccataatttgaccttagctgatttgttccctacctctggctttgataatcgtggcacaatgcagtttagaagtatgccctcggcaactgtgatgaaaactggaactctcagcgatgtcagtgctttagcaggagttttacccacacgcgatcgcggtttagtctggtttgctattatcaatcgcggttacaatgtccccagttttcgctctgaacaagatcagcttttacaacatctggtgaaacaattacaagtatatactggtgttcctacagccctgactccccattcacctaaaaattctttaccaaaattaggtgtacccagtcgtaatcaaattgtttatagaagttagtcattggtaattggtaattggtaattggtaattggtaattggtaattggtaattggtaattggtaattggtaattgggaaaaataaaattgattacccagtccccagtccccagtccccagtccccagcgatgcactgagcttgtcgaagtgtccccagtccccagcgatgcactgagcttgtcgaagtg

SEQ ID NO: 87 - DNA, 19237 bp, Sphaerospermopsis sp. LEGE 00249
  LEGE00249_105
ggctggggactggggactggggactggggactggtgactggtgactggtgactggtgactggtgactggggactgggaagatgaataacctaattaccaattaccaattaccaattaccaattaccaattaccaattaccaattagttagcagtaatattgacaacatagttattgagataatatgaagtcttttaaatctttagttgcagttttaggtactggtgcggttctgagtttgctaatcaatcatcaacctgcacaagctcaagtagcttatggtagttatgtgggtattggtcctacaattgggttaactgacgacgatacccaactgggtggagttttggcttttcgctacaaattattagaaacacccgtatctttccgcgctcaagctttaattggtcaaggtacagcaattgtacctacagtttcttatgatgttcccctcaattggcaaactgatgtttatttaggtgcgggaatggttttaactagtggtgatactgcttcccctgtaggtaataaaattagttttgctttgcaaccaggtattgattatgttgtccctaatagtaagactgtgatttttggtaatgctattattgcttttgatgcttaccgcaatagtggaggtacggctttatctttacagggtggtgtgggtttgagattttaaatcaataaaacctaatatttattccgtaaaagagcaaaattacgggggttagtaggaaactttacccttgtgctactgactccgtgaaatcaggtggggttttcgtggtgatgactggcgatcgcctacaatgtgagttttgccatcattactgtacacccacagttcgccctccagaaccaaagacaattggagtctctggtgtttgcggttcccaacccacatcaaatccggctttccaggcgatttctctggcttgacggaaagtagcaaaactatcaggtcttactaaaaatgccacataatcttgatcggtttccaacttagataaaatatttttatattcagaattactgcgattcaattctatacctgattccccattattggatgattttggattatatcgccatgaaagagattttaaatctactaattcaatttcataatattttgtctctgctcggaaatccttaatttgttgtacttgggtttctacgcaattttgatattctttaaattcatacaaataactatcaactaaccctggaatataacttggtctaacacagtttggtaaatttctgactaaatctttaatttgctgactcactgatttattatctaaataaataacccgattaccactaatttcaaagaaattcacttgtttatcagtttctttggctaatggggttctgactattgtactagactgcactgcaaccaatgtaataaacagactaatgaacattaacaccccaacagtgttagttaagatgtccaaaaaagaatctagattttgttggggatgctgggatgtaaaataacgttttcttctcatatatacaccattaaattatatcagatatttccttcaattttcagagtccatccttcatcaatgggttcataaccaatatcaataccctcagattcaattaatgccctaacctgatcaaatacttcaattccatcgggtctgatggctacaatcaaatattgtgtatctctgttaactttgacttcttctagtaatgtttgtagtggagaataagaaagattaagggctgttaaactcacaaattcttcaccaggatgaataataatcccatcactacgacactcaatataacggggttgtttattctgattttgtccattttcagttctggcaacaattgtaacttgtctttgattactgaatgtttgcgccattaagacaataatcaataaaattagcaccccaatagtacaagccaaaactgataaaaatggaaataattcaatttcagttacagagcgtttggtaatccgtttaggcataaatttgtttaggcataaatttatcttatcagcgtttttcgtcagattccactaaagtaatacgacgtggtttatttaggttttccaaaactggttttaataatgctaaattaatgcgaacttctcctaatacttgttctaattgtgcggttttttctaacgtttggaaactctgttctaaactgcgttgtagttctacaatcttggtgatttgagcagcacagttttctaaagcagcaatgcgactatctaaagatgtagcagctttctggagtccttcagaaatttgctctgtatgtatgttaaaatcatgattaatattttggtaattttcttgaatcgtcgtattaatttgtttcatttcttcaacaatttcttgacttgattcttgacttgattgttgttgttgagttagagtagtaatgaaattttctctatcttgtacagccatttgattaatgtaattcattttctgtatgagtttattggttgcttcttggattttaccaacctcacttaaaaacccctgagccaaagcatcggcggcttgttgagcgtattcttgggctggtttaatcaaaacttctggtgagggaagatgtttttggaatgcctgggaaatggcattattaacaatggttctatctaaactttctgctgctttgagacggggtaaaagtctgtcattaatataaatatcaattgccaataataaccgggattcctgtctttcaactaacaccaaaggaatcatcaccaaaacactaacgaataaagctaataacgtcgtgtcaaaggctacggctaatccactggtgacagtaccaataccttgtttaatttgttcgatatcactagactgttgtaagaagccactaaaaccattgacagcaccactaataccaacaactgtaccgatgaatcctaataggggaattgcccaaactaaaatgcgagctacagaataggaagtttctgttgtgctgctataaaatgctgagtcttccattgcaaattcagtagcagattgtttatttccagaagctatataggccgcaatcacccgactacaacgacgggctaataaacttttttcctgagataacagttgttgtagtttttctagttgaatagatgtgggattatcaaatgtaatattttccggcaataaatcttttctaaatgccctggattcactttggattttaccatatttcaacacagtgatagtgactaccatacccccaaagaatatggcgagaatttgggtgaatcccctctcatataataatgttcctagaaatgtgcttttaataggtaacaccgcagcatagataccaaaggtaacgattagtcctaaaaggaggataaaccaaatttggatgtctaattcttgacggtctgatttatgggcaaagtttaaggatttagcagtcataatttagtgtgattttggtttgattaataatggtgttcacatggcttagtacgttagacatctccagaaaagaaattatggaacttatttatcggggcaagggcgaagcatttgggatatctaggggttgctgagaaagtctttccgtgagggcataggagtcaggagtcaggagtcaggagtcaggaggagatttgaaaatttctttgccatctcttgaaatcccaaaaaatgcacactttttccggtatacccttcaaaacccttgcactaatttctgtgtttatcagcctctaacctttgatatatcaaggttttaggtttattcagcaaaccctatctagatgtctgatttttccgttaaattatcgccctgtaagggcgaagcattcggaaaatatcctttggtgaataccgatcattaatcgctcgaatgcttcgcccctacttcgtccctacatctttttcggagaagtctattattaacttgcatcttctaagtattgcagtccccattgatacaaagaacgcattaataagttatgaaaattggggggagtgctaatttctttgaatgtatccgtcatcaggtttttaatgttttctgaagttgttggtatatatacacctgaaaagttattattagcccaaatatcaccgatttttgttgaagttatagattcccccttatgaataatttcgttgcgctttattctaatagcctttagcaattttgaccatttattgtcttggttaatttttttgtataaacaccaaccttgcattaattcggctagacttacttcatctttattacttactacccaacctctagcagtccaattttgggctgttgattgaatatacaataactgttctaaaagttgcacaaactgaataaatgcagtggtgtaattttctcgttttagagaaagttctaagataatagttgattcccataacttggtgatatcatcagtttgcattttttggagttgagttttccaattgatgatttgttctgaatcagttattttactaacaccattagaacctatccactctttgagtttttgataaaaatcatcattagattcccaattattatattttgctaaaaaaccagctaatttatataatactgaatgacgattttcatgaacttttagccaaattttggcttctgaaaaatcccctctttcccaagctgatttaatcttgactttttccaacgcccagaaatattcagccatagaaattaaactgaaagtttgggaatgattagcggtttttaaaccattatctaactgactaaaaaactccagtggttcatcaggactggcattaaatacttgatattgacgtactaaagcagccgcacaaatttctacattagaagcaattacaggggtacatcctttagtttgtatccagagaacaaactcttgattttcgttagcattgatagcttcttttaaaaccagttgttctaattcttctcgaatttcatcactattaccagcattaatttttggcgcgtgaacatcaactctaatatcaggaaataaacttttaatttttcccttcattaattctgctaaccataaagtatctaacctgcgaaaattccaagtaatacttgttggttggtctgttccccaaaggataatatgttttaaaccttgctttactcctccttcaatgacagtttgatctaacagcaattccacattactaaagtcaccacctaaccattctttacaataatcataatatctttgacctaaatcccgaccactccaaggataggttttaccattttcatcttgatgattacctcgttctattcctaattcttgatagagttcgttgatatgtggaggataactaatattaccatctgcaccaaaggaacgaatgataccatcttgacaacgccagcctatttgtcgtgttcctacggtgattattagggtgctaacttgattggtatttgttgttttcatagggggaatatttgcagtttattttgtaatgtttctaaatattttcggcgtggattttcattagcaccaaatacagttactacttggtaatttcctaaatctgcaatccagataggggaaggaataacccgattaccttgagttttgccgcaaagattaccgtcataattattattaaattttagctcatcactatgtaaaactgatagggcataagatttaccaaattgttcatctccagaacatacaaagatacgacaatttgcgtctattgcttctgtccattggttatttctaactattccacaagttcttaattgtcgagaattaaaattaacacctaacgcttgtaatgcttcataaaaattcctgattttagttttgaataattcttgaaacagtctagtattatctggtaatttccaaaaattattatcactttcagtaattaaattacagcctaaattacagccacgataccaaggaggacggggaggattacgatcttttctagaatataatggtcttcttgcaccttgaccaataccacctaaatgaaacattaaccaggtgagatttttgattagtttctctaagttctgtttttgagattggggaatttccggtgaatagtttaatgtgagtattcccgattgtttaccaaaatcatcatttcgatttgcagcattatctctaatagtttttccttccaatactctaaccattaaccagccaaatttttgattaggggtagtaataccaccaaatattttagcttcccattcctgcacttgaccaggttctaaaattcctaatgcaaagcttctaaaccaatatcttaacattgatttaaaggcgacaggtcgaacttctggattagaaatagtatctggttttaattttccttggctaagtctaaaattaccatctctgtctttttggtaaggttgtttaatatcttttaatttttgacgaccatgaattaactggccttctataacaaattcaactctaaaaaattcatgatttttctcaagttttcctgcgggatttaattgaccataaccagtattaatttgagaacctacaccagcttgtaaacctttgattaaccactgtttgactttttctaatatatcgttatcctggcagttactagctaatcgtaacccaatcagaaacatgggtttttctaaactgaaaaacgggttaggattggggctatatttaggtgtattattgtcccattgccaaatattattagccatatctacagctaatacattttgattttgatttggtaaaggataagcgtctaaaaatacaactttaccagcttgttcttttttattattagtttctactgaaccaaaccaagcagcaatttgcttttctgcatttttccagtcaatattttgtttagccatgatttcccggatagcctgggttctggctacaccgcgcaaagtgctagagggaatataaggaatacccaaagcatcaaaagcaggtaataaaatactttctggtcctctatgtcctcctactctaatgcgccaaggacattggactttaaaacttttttgggctattaattcagtacgttttgttagttgttgcaatcgctgaaaatattttgacccctgttctgccatttgtaatatttgtactttggtagagtccttatagtcactatcgggcgatcgcatccaccgcagatattctacaaaactagcctctggatcaggtttaggttcatggtctgcatttaaccagggagagggtgtagcgggttgattaccgccactgtgtcccccgtgactactggaactaccaccaccacgaccaccatgaccactaacgggaacattaattactcttctaggtggattcatatttgtagatggttgaggttttttaggttgattaggtctttcaaataccattacttttagtctcccttaatatcccaataaatagcagtagcccaaaaactaaattcctgtgccaaagctaatcccaaacctgtgatacctaaatattcatctgtacccagggttttcaaggtttctaaaccttgttgtccagataaattttgttttcctgatacttcttgtaagcattcaaagaatttctgcactacttgtcttttacccatcatgccatcaggtaatgccatttcttcagcttttaatcgcatcattccccaagtggaaagataggtataaagttccactgcttgacttttttgttgtttcaaacgagtgtcatcttgattgggtaaattctttaaatgatttaaagcatcgtaaattggtatagcaattgttctagggtcaaatgtcatattaatttcctttttctgactacacttttacaggctataaaattattgttttcatcctgtaaatcctgtacttcgacttacttcgacaccgctcaggacaggctcaggacaggctcagtacaagtcgctcagtaaccgtaagtcctgattctgaaaaattttctaattctcttgagaagttgacatccattgttgaacaaatccccgtcctaaactttcttgtcctccaatttgtaaaatttcattggctgctaataaatttttcaaatcatcgtaagatttttgtgattttccattagcttgtgatgtaattccccaaggtaaatacattaatgtatctggtggaattgcttcctcataacggaaaccaccatttacagatttatgttcatcgagtttaatttttacttgtcgccataaactcatttgaattaatgtagcacaatgtttatcaggtaatactaataaacgttttattgaatctgttgctgatgatttgggtacaaattcttttgagttttgccaaggttgtaattgtgcagagttgataattgcatctttgagataaaccgcagcattattattaaagttacaactatattcaggaggtatggataatttaccaccttgtaaacgttgccaacgttgtaataaaagaggacaactaacccaaactacactatgacttaatgacggaactggcaaccataatatagaagcatcaccaatccaaatatcaccctgttctaattgtccatcttctaaatcattaccaaatagctgatattttgtgtttttatctgtagccaatgaacgcactttaccccgcactgtactagaaggaatgtagggtaaattagtatgagattcacgggcaattcctaataagttaccctcttgggttgtaccacctgtatgtaatggtgaaagcagatataaataaatgtattccatcgttatttttcctaatttccttgatatttaatccacaacatttctgaataacccaattgtcgccaattgtttacacgatttttttcaccattagctaaaagttcattattctgaaacaacccttgaggtttattcaaatagtacaaactccccggtggtgctgcaaatacttggggtgcaggaatgctttttgtgatgctttttgtagtgctttttgtattgtcttctttctccctaattctacaactaatcggtacagctttatctgtggacatactcacaaaattaccgtctttgattttccactcccaaggataaggacgacataaatttgcccgttgttcaggattatatttatgtggtctttcaaaaactccaggagtaactaaataagctattgctttaccatcatgttgaaaattatcatcggatagttgttgtaactcttgccattgttcccccaattctggacaagattctacaattaccctgtgtccttctcctcctaatctgattgtagcaggtgtttcaatttctttgctgattccgattgtcaaactccaaccttgatataatctaatagcgttttctacaaagtaaccatcggcatctttaacttgttttgttccgggttcaatgctattatgagaacgggtttctatggtgtatggtttatcttcgtgtctaccttcaatggcttgccaatctaacttatcaagtttaccattattgaggtattttttaacaatatcataaggtaaatactgtctaaattcagggctttgttctttacctgaattatagttttcttcctcctcctcatctttgctattataggatttcaccaatggacaaggttgagttttatcccagagagcattattgatataagattcttttgcccacactaaaggtacaaggtctatagaacccgcaaaccccaacggacggggtaaatatagggtgttttcataactcaaaaatggaccagtaatatcaaatttaatatctcccaacaacccccgcaatgccccggctatggtatgaccattgggaggaaacacactacccgcccacgccctttcttgtggtgaaaatggtttggcatcccttaacattaaaatatccaacggtgtcagtttgtaccagtgcattaattatcacctcctagtttgatgtgacggttgcgtttaacgaaagccgcaagtttgagccaattttgaatttcgctgtccaagtcttcagtttgggtagtgataaacaatgctttgaggaagtctgcaagggcttcttgaaattgctttttgttgtctttgttttcttggaattggtcacggcgatcgcaaaacaatctagtccagggtattatggcctcctgactcggtgctgggtgctgactccacagactcgctgcttgttcaaatatcgcactttctaaatcctgttgaattaattgttgccactgatagaaaacatcaaatttagcggtggatttcagggtgttaccgtttccgtagattacccgcacctgtacagcatcttttttattaaaacaggctttttctccatgtttttcagttggtataaggcaactatgatgatattcgtgttttttcgctgcgtcttccgcttcccagaggctttctaaagctattgctaaaggtactgagtgatgagcaattacgataccaaagctgatggtggctgcgctgcccattgtaaataatggacggtcaactaattgatcacttttgcccttaaatttccaataatcaccctcattactaaactgatcacggggatcttttgcacctttaaaacattggcggatatcccataaccatttatcccattcccacagattcgtataagctaaaacatcatcaccaccaccataaattaatctaccagcataacgattttgtgtcaaatagggaactaattgattagaaaaatctaataacgccctacttaatgcgctgtgggtacttggtcccatgcgtttttggatttctaagaattggggaaaactctctaaattaactgataattttgatggtatataatcaccataggttttgagttttgttccctttaaccattcactcatactatcaccatcacctgcggctaatacataccaatctgatggattgttactaggataggaatcactaataatattgttgatttctcttctatattcttccttcaactcagtgctattaggtaaatcttctaatatccaatctgcattaagtaagcggggatggtattttttaggattctggtttttatctatccaaggaataccccatttacctctcatttctgtgagtgtggtttcaagttcagggtatttgttaactattgcttgacaagctttttcaaaatttagtttatgtcgtgtatctccagcattaacttttaaataccccgccaccccagaagttaaatctggataagatgctgcaatatctttttctgggattcccaacaagtgaggtaatactttatgtaacccccgctttaatacttccgttgcatttagttgttctgttccatcaaaaaaccctgcatcatgttttccccataatttcttggtatcaccttctgtcatccagtcttttcccttctctttattattaccaggattgacaactggaccgataccagaaattgtcgaacggggtccaaaagctgtaggaagttcccaatttctcgcgttttttactgatgctaaactagcacgggtagcgtcaaaaatataagcccaccatgaacctatgttaacactaaattttctgtgttgttcttctaatctttgatgataagcttcccgtaaaaattttagttcttgtgattgaaataatttttgctttttactaacattataggcttcattttgttgatttaaccaagtttgtaattgatcatcaacattttcaggaatagcagcagttttgaattgtttacctttaccaattggtaatgctgtccagtaaacttgccattgggattttaaccaaccttgccaactattatgatctggttttaattgtctcatccaatgacgttcattttgtaattcttttaatactaaatccccaacttctaaccatgcttctaacagcgtttgttgggctgtttgcatggcagcttgtactttgtctttaggtaaaattaatgatataacgttaggaaatccggcggttaataatgattcatgggatggtggttttacccattcggtaaaatcaaaatcaagtttttcttctcttttcaacctttcaatttcttgcaataaccaatgatctattaatggttgttgatataaactaggataaagtaaggtatctggtccatattgattggcgagtttccaacaaactttagctgatagataatgtaataaccaagaacccgcccaaaaatctcgcattttgcgactagatttaattagttcctgtactggactaaaactaaataccgctaaataaggatgagataattcatcatttccttgccaactttgtacttgttctgctgttaaatcatatcctgctaatgcgccggctaatgctgatgtcatactcaaatgactccaaatagaagcatcaggtaaacgagtttctgccggcattaacattaatgaattatctttatcaaataaatcacaggttgcttggggtaaacaacgccataaccaccaaaataaatgtttgatgtttttaatatctgttcttaaatgattgtctatttctgctaatagttcttcttcttttttctttaaatattcttgacgttttgattctataagttctgtatggagtttgattttaaattcttgttttgcaccagataataaatgggtgatttctaatcccttttctgggtttttacctggggcataattgatactggctgtgacgctacccaggactgacctatcactggctgaggctatataatccgctaagaggatattttttaatactttaccacctgattgatctggggttttacctgtctcaacccaaggtttcataacttctagttgttcatagaagctatttttaccccgtccgctattgttatgtaatgccttcagtatagggtcatgcagtaacccccaaatcttagcccgccaatattctgctgtcatcggtgattcccctgtgtagccaatatttatattgtaatgacgggatttagtatttgtctattgattgacaatatttaattttcaatataaatcaccttgaaatcctttgtgtataaggctttgaggtatttatttagtttaattaaaaatattgtttattttttgacattaattgcaaattgtgtatttttatgccgatttgttgatactcaaatgttattaagtaggggttcagcagtgctaaacccctacggtaattggttatgtagttaatatcccctgtgagtggggatatactcaagattgttaatcaggcgtggactgaacacagtttccattcaattaatatgacatttgcgatcattaaggaagatcccggacttcttagagaagtccgggatctgtggttttcattcaatacgtttccattcaattaatatccccagcgagtggggactttagaaaaagaaaacgcggagttgcggcatcggatgtttccattcaattaatgtccccagcgagtggggacatcctgatatatttggctcgccttttttagagccattcgtttccattcaattaatgtccccagcgagtggggactgggtctatcacgatagagtttggaaagggatagtatgtttccattcaattaatgtccccagcgagtggggacttatcttagtgataaaagagcgatcactattcctaagtttccattcaattaatgtccccagcgagtggggacctagtaaaagacattggaaagaaagttgaagaatggtacagtttccattcaattaatgtccccagcgagtggggacctcgaaagagctgctgcaaaagcagcaaggctggctgagtttccattcaattaatgtccccagcgagtggggacttcgtcgacctcttcaggtgacgggatgccttgttaccaagtttccattcaattaatgtccccagcgagtggggacttgaggaaaatcccaattcaacagactaccccaaagtagtctacgtttccattcaattaatgtccccagcgagtggggactacctcaacaatgacaagcagaacgctttgctgttcggtttccattcaattaatgtccccagcgagtggggactgggtgaggctgagtatgaccctgacaccattgttatcaagtttccattcaattaatgtccccagcgagtggggactttggtgtttacttcttctcaggtgcgttctgaagtttccattcaattaatgtccccagcgagtggggacttgcactataatagctgtaccattcctcaactttctctcctgtttccattcaattaatgtccccagcgagtggggactgggtgaaatgtctcctaagtatcgtgttttgggcgcgatcgcgtgtttccattcaattaatgtccccagcgagtggggacttttgtgggggaaaagcgaagggtactcggttcttccgtttccattcaattaatgtccccagcgagtggggaccttcagcgactacgctaccaccacccctcgccaacggtttccattcaattaatgtccccagcgagtggggaccacatggtagatatcccctttagacctgaccaaaatgaggtttccattcaattaatgtccccagcgagtggggacccgaaccaccccctgtagtggacatagaatcaatcgtttccattcaattaatgtccccagcgagtggggacgagcgagaggaagacacccttaaagctcttaaagatgtttccattcaattaatgtccccagcgagtggggactcggcggcacagaaccagtggaggtgcaagacccactacaaagtttccattcaattaatgtccccagcgagtggggacaactaatgagcaattagcggtatatactgctaagaaagtttccattcaattaatgtccccagcgagtggggactcgataatagcgatcgccaacccgtctgaagagccagggtggtttccattcaattaatgtccccagcgagtggggaccttcaatagttccgatggcgacttcggtgatctagtttccattcaattaatgtccccagcgagtggggacaagagtaacattcttgactattcctaatttttgacgtttccattcaattaatgtccccagcgagtggggacttgaaatgatcaatagcgatgaggaaggcattcaaagtttccattcaattaatgtccccagcgagtggggacctggatttggacacccgcttactacgcttccggtggtttagtttccattcaattaatgtccccagcgagtggggactctaattggagttcagattatggcactgtttctcagtttccattcaattaatgtccccagcgagtggggaccgatttcttgggctattttgatggttgcctttaaggtttccattcaattaatgtccccagcgagtggggactaagtatcataaactgttatccgataaactggaaactgtttccattcaattaatgtccccagcgagtggggacatacactagtttcgcgagacacacttgaagatgcgtggtttccattcaattaatgtccccagcgagtggggacttcattgataatccctggtgtttgttaggcgatcgcactatgtttccattcaattaatgtccccagcgagtggggactcaatccaaatataagtacctgacaaagttttaccaagtttccattcaattaatgtccccagcgagtggggactgcaactaatatcaatgattcaactgatagctttgaatctgaagtttccattcaattaatgtccccagcgagtggggactcgccaataaagctcatcctgctcttttgggatactaaagtagtttccattcaattaatgtccccagcgagtggggacccctccattttaaacccagacagtgcaaggagtccagaggcggtttccgaaggtcacgaaaaaaggtggacagattgccttcccacagcgttcaaaaatccccataacccttacccagcaagcaaccgaagctcgcaacggaataatcaacatttcagccattttacctgaccttcggccaacgccgcgcctccctaacaactagacaataatcgaactcggcgtttcaatcactggtatccccactccccacgcttccacctgggaaagagtatatcgagacaaaggataaaacctgacattatcctcctctaacttaacaatcttccttaaccgacgacgtaaatcattgtacttttctgtatttaactgacattcaaacacagaatactgtacacgctgtccatatccttccaatacatcagctatctttttccgtcgtttatcatcaggaatatcgtaagcaatcacatacaaaaacataacacaaacatcagcaaaaatcaatcaattcgatatggtttataatcatgactgggattataaacaaattgtttaaaagccctcacttgctgagtcaataaatcccattttggttgtttaattccctcatccgtttggatttcttcagtcatcctttgcaaaaatccccgtaaaaactttttcctacctgaatcattcaaataacaccccccatccttaaactcaaaatcagcttgaacatccataattttgcgattaattaaccacattaccaacgaatctaccaacggggcgcggaactcctcaattaaatcagaagccaaagccgcgtgaccatcatttgcctgatgtaaacaagcataataagggtctaatccttggatttcaattaatgctaataaatgattccacagcacctgatacccaaaacttaacatagcattcaccgggtttcctggtggacgacgactacgaccggaaaacacaaaatcagggttagtcagacattcactaaaagccgaaaaatattgagcagcacccgcaccctcaaaccccattaaccgttctaaattatccgcttgtcccgcttgttcagctaaataatctaaactttctaaaaccctttctaaaacctcagattctctttttttcttctgcctccttaacaacactctactatttttcaatttacctttaactatcgccctagcagtaattaatcggtctataggggttaattgttgttgataacgggataattgtcggtatcctctagaaattggtaaaattctcccgtagcagtaacccatctttgataaataagcaatgggaatatcacgccataaacaagcacgaattacttgggtggttatttgagaataaccaaaaatcaaaatctgttctaacaaaggcaactgtacttcaatataaacagtatcaccctgtttaacaatcaaagattccttctgtaaacagacatagcaattctgctcagaaacataaagagtctgcatattaaattaacgccaccaacgttgtaaattagatttctttgtacgatgttcacctccagtaccagatgttaattctgcattttgttccggttctaaccacaacactattctatccgccatactggaaacccaaaaagtagcaaaagtcactaacagagtattcataatcacagcagctaaacccaaaggtgcaattagcaaaataaccagagtaatagttccattaacagtagagacagaaacatttctgacagtagcggaacgtctggaaatatacatgatgaataaaaacccgacacaaaagtgatgatattgactaccataacttcagagttacccaaaaaccagaaaaagaagataaactgaattatgataataatcagctagaaattaagattttcaacacttacagctaaactttaaaaactgtttcaatattttctttttgtacgtagattatttttcataaactactaacaaagtaattattttgacaatgcctaaaaaaactactcatctctacacagaacgtttagcttttgagcgtttattagtgttaattgctaccttactcaaatacccaggtgtggggagtccagaatttgtagagtctggtgacaacaaaaatcatgatgcaattagtatagtaagaatatatctacagcaattagcccaggaattaaatatagaattacccgacaattatccagcagttgccacactacgcaaagatttagaaacactcagacgctacggtattcttgatcaacgaatgtatcgatggggatattatttaggcactggtgcgctgtctactgctgaactaaaggtagcatttaacgccatagcatctcaagcacaatatcaaggtgatgcccaaacaagacgtatttatgaaaccctgagtaaaagactgcggggtttggatatggaactcaagggagaatttttttatcccacccgtcagcatctcaatcgtgccataattcacacagaccccgaagaaatggccgccaaaggagaaaacagagatacattatttcatcaattaccattattagaacaagctataagtcaaggacaagctatagaaatttcgcgtactaaagatttatatggtactaatcgtactggtcgctttcaagtatttcctttacaattaatttatcatgatattgcctggtatttattatatgaactttgtgaaaatggacatttagtaatggggcgcgtcaaccgttttaatagtcattgttatcctgtaaaaataccagcacggggactagaaaaacaaagagcaagtttaacgaaagcctataaattatttgaaaatggctggggattaaatttaggtgatccagaatcacaacaattagaattaacaggaaatcttcaatttgttgaggttaaagtacgtttttattatcctatctccaattttattttagaaggagagcgtcgtcatttaaaccaaaaaattatactaggagaaattgacaaaaataatggagaatacaaatttatagaataccatgtagaattaccaccccgttctttaggtgagtttattcgttgggtgtatcggtatatggataaagcagaaatattgtctccaccagaattaataaaacaacactctcaggctgcacaaaatttatataatcgttataaggaaaaaggctgaaaacccttgaggttaagttttggagcgtggcggagaaacttaaccgtcctttaggcaagggatgaaagccagttaaggcgtttacgcctcagtgattttaactattgtctttgttgggcgatatagtgtttaactgtttccgtacaaatattaccagcagtgctaacaaaataactaggagtccacaaagtaggaagtttcagtaactcaggaaattcttttctcaagaaacaa

SEQ ID NO: 88 - DNA, 18717 bp, Sphaerospermopsis sp. LEGE 00249
  LEGE00249_106
tgcctcccctgccccctgccttttactttgactcttccatttgaccaactctgcgaatgttaagaatatcactcatttttctaatctgcacaaacagatgttctaattgattgcgatcgcggatctcaatccccaaatccatcaacgctggttgtcccaaagctgttttcacattagcatgacgcacattgatgccttgatcactcaaccgcgataaaatatcttttaagattcccactcgatccaaagtttcaatttgaatctctatggggtaagtgtgaggacggccatgatgttctattgctgtattccatcttacgggtactaggcgctcacattccacattgtccacattatgacatccttggcgatgaatggatataccccgtccccgcgttaccaccccaataatagcttcaccaggaatcggcgtacaacatccagctatatgataaaccaatccttctacgccaataatcggtgaatcactggcacgggatgtactgggtgcagtttcccgtgtagtttttgatgttgattctttggggataaatggaatcacatcagctacaggttgttgtgcttttaccacttctcgccagcggtttaacactaagtttaaggtaatttccccgtaacctaaacctgccagtaaatcttccacactgtgataattgcacttttctgccacagtttgcattgcgtctgatttcaacaagtgatcaaaacctgttttccctagttccttctctaataaatcccttccccgcgctagattttcttccctgcgcgatcgcttataccattgtttaatccgatatttcgccgccgaagtcctgacaaaattcaaccaatccaaactcggatggctatttttttgcgtaataatatcaacaatatccccattttgtaatcgggtggataacggcacaatgcgcccatttacccgcgcccctgcacaatggtttccgacctctgtatgaattcgataagcaaaatctatacttgtagatcccggacttagaggtacgacatccccctttggagtgaaaacataaacatcatcttcaaataaattatctttgatactatctaaatattcttgcgcgtcttttaaatcactctgccattccaatagttgccgcaaccaagtaaatttttcatctgctcctgttacctgactggtagaaccgcctgtttctttatacttccaatgggcagcaataccatactctgcaacatgatgcatttccattgtgcgaatttgcacttccaacgggcgaccggtcaatcctatcacccctgtatgcaaggattggtaacggttaggtttgggtaaaccaatgtaatctttaaatctgccgggaataggacgaaaagcatcatgaaccaccgccaaagcccgataacattcttcatttgtttggacaatgattctcagtgcagccaaatcataaatttcatgaaattctttttgctgtcgctgcattttttgataaatgctatacagatgtttggggcgaccgctaacctccaaacatttaatacccgcttgttgcattctctcccgcaacacttccttagctttagtcaatttttcttcccgtgctgtccttttttccgcaacgtgctgttgaatttctcggtaagcatcaggttctaaatatttaaaggctaaatcctctaattcccatttaatatgccaaatacccaaacgattggctaaaggtgcaaagatatctcgtgtttcctgggcgctgcggcgacggctggcttctgacatatattgtaaggttcgcatattatgcaaacgatccgccaatttcaccacaattacccgaatatcctgcgccattgccaaaaacattcgccggaagttttccgcttgactgtcggttttactggtgaaattaattttagaaagcttggtgacaccttctaccagttggcggacttctgccccaaaattttcttctatttgttcaattgtaacttctgtatcttcaactacatcatgaagaaatccagctgctatcatagcagcactaccacctaagtctcgtagtaaatcagctacggctacaggatgggcaatatacgcttctccagatttacgatactgtccttgatgcagttgataggcaaatttaaaggcattacaaatcaaagtggcatcattgtgcgttcggtcatcttctcccgtgttgcttttcgctaatgtttctcgtaaacattttttaagccattccgggagactaacatcaacagaggaatcaacaagtaagctgctcatacaagagaaatgataagtttttcgtggatcggtgagatatagatgaaaatgacagcatcttctattgatgatgctgccctacagacgggtgggaaaaattttgtcagaatgattttctgattacctgatgatctcatgactgatcagcctgactatccataagaatcaaccaagtctcacagatggttttaaggctattcttaggaatgagttgggaaaaaggtttattctagaaataaattttcttgtagtttatactatctcaactagcaccaaatgtctttaaatctgcaaaaatatcaggaattgacaacattactggaggaattacgctccaatgttaacaaaactcaattagatattcctaccttgcgatcgcatctagccgatttacagcatttttttttacaagaaatcgctcccttcactgatttaaactaccgccagcagtcttatcaaacggaaattagcaagcaacttcgtttattagaagtagatgtaatttttttacaaggcgcaagacagtctactacaatacaggcaagattaaaaacaattacagagcgtattaatattttaattcgattctgtgaggctattttacacccagatgagaagggagaatattaactaatatgaatctgctatcaaggcaatagttttcatggtaggttggttgcaactacatgacaaacacactcattttggtataaaatattctgtatgtttactaaaatacgtaacattttagctcaattttttaacaactccagaacaatcaacaacgaaccactaaataaagtgagtttgattgtaatcattatagtagatattttcattttaatcaatgtttttacaggtttagaggatattagtagatggcatcttagtccatccgaagcctatccatgttattcagaatgggagaattatcaaaagcaaagtgataaaaataaagattatgacatgatcataagttcagtaccattgaacaataatcaatcaaattttaaagcggcatatcaacagcaagaaattggacatttagggaaagtttcagaaatatgtataaattatgccgagttaaaagacagcctgaataataacctaaatcaaaaaaatattacaaatataaatctacgccaggagaaaattaatcaattagaacaagcgaatataaatattcgcaatcaatatgaatcaacgctgttggaaaaaattgcgggacagtcatctgaaaaatctatcaatcaagtcagtgctgaaaaagctaaacaaaacttagataaaaatcaacaacaaattggacaaattaaacaagaaattaataatcttaaaaaccaacttcttactaaaccagaaagtcttaattttctatctttgatcaaagatgagaataaattcacggcagttaaacaaggttatgaaagagcttcgttttggtatcctagtatccagcttacatttcaatctatctttctactacctttaattattattgctttattagtctatagaataagtcaaagtcgaggatatggacttattgcattaattagctggcatttgctggtaatatttttgattcctcttgttctcaaagtcttagaatttctgcaagttggtgtagtctttcaattcttattaagtgttgttaacaaactattgggtgggttactattcttaattagttatgtttatatcttgctaattcctctcataggttttggaattatcaagttctttcaaggagtagtatttaataccaaatttcaagttgctaagagagttcaaaaatcacaatgtatcaattgtggaaaaactcttaaatccaataatgcccattgtcctcattgcggttattatcaatatatagagtgtcacaattgccataatttaacttacaaaaagttaccttattgttatcattgtggaactgagcaaaattctagtcagatacaagacgttggatcagtagacaataaatagggcttgctgaataaacccaaaatactcgtaaatcaaaggtttgaggctgatcaggaggaaagaaagtgcaagatttttgaagggtataccttaaaaactgtgcattttgggtctgataaattagaaaatctggggataacagatagctaaaactattccctattccctattccctattccctgcctcaacgaagggactttttcagcaaaccctaaatagacgataattaactataattaaccatgagtgaagccttatttagtgttgaaaatctccgtgtcgcttatccccaacgtagcggggaagaagaaaactgggccgttgatgatgtatcttttgcacttcaaccaggggaaaaaatgggcttggtgggtgagtcgggttgtggtaaatctactattggcagggcaattatgcgtttattacctgcctctagtcgagttgaaggtaagataatttttcgtgatgattccgtattagatttaacacctgtgcaaatgcaaaagtttcgcggtgaagcagtagctttggtgtttcaagatcccatgacaagattagatcctttaatgactattggtaatcattgtttagagaccttggcagcgcattcaccagaattaactaaacaacaagcgaaagaaaaagctttagcaactttagaaaaggtgaaaattcctgcaagtcgttggagtcagtacccccatgagtttagcggagggatgcgtcaaagagttgctattgcgttagctttactgttgaatcctaaattaattgttgctgatgaaccgacgacgagcttagatgttaccgtttctgctcagattttacaagaactaacgcggttatgtgcaaaagacaatatgggattattattaatttcccatgatttagcaatggtaggggaatattgcgatcgcattggggtcatgtatcaaggtaaaatggtagaaacaggcaaaacagaaaatgtctttaaaaatcctcaacatgaatacacccaatctttattaaaagcagcattacatattcaacaagaagaggtaacagggaacacttcgacaagctcagtgcatcgcagggaacagggaacaggaattaaagaaaaaccaattttaaaacttacagaactgcaaaaacattataccatagaaccgaattttattgaaagaatatttaaaggtgaaggacaacaaattaaagctgtagatggtattaatttagaattatatccaggggaaatattaggattagtgggagaatctggttgtgggaaaagtacactttctcggactattttacaattaattcctcccactgggggaaaagtggaatttttaggacaggaattaactaaattatcccgtaaagaaatccgttcttcccgcagacaaatccaaatggtatttcaagatcctcatgcttgtttaaatcctgccatgacagtgggacaaagtatagcagatcccctattaattcacaacttagctaatgctgaaaaagccaaagaaaaggttttatggatgttggaaaaagtgggattaacaccagcagaaatgtattatcaacgttatccctcagatttatcgggaggacaacaacaaagggtagccattgctagagctttaattacccaacctaaactggtaatatgtgatgaaccagtgagtatgttagatgccagtgtacaatcacaagttttagatttaatgctacaattaaaagacgaatttgagttaacctatttatttattacccatgatttatggttagctcgttttttgtgcgatcgcatagccgttatgaatggtggtaaaattgtagaactaggaaatacaaaagaaatttttgctcatccccaacatccctacacaaaaacccttttatctgctgcaccattattagctagagtttaatatcatcattacccattacccattacccattacccattacccattacccattacccattaccaaattaaataatgtctaaaaaacaaccgataaactcatttaaaaataaaaactattccttagataaatggcaagagagaatagcacaaatcgcctatcgtttcaataaagaatatcaaaaagaaccctttgaagtacccgcagaagtagaagaaatgccaatctataaagaatggaaaaatggcattttagcttataaaattgcttccccattttgggaaattgcccaaccgcaaaaaaaccaacgttgtttagacattggttgcggagttagctttttaatctatccttggcgagattggcaagcatattttcatggacaagaaattagtaatatcgccagagatacacttaattctcgtggttcacaactaaattcaaaactctttaaaggtgtggaattaggtccagcacaccaattaaactatgatgcagcacaatttgatttagttatagctacaggatttagttgttattttcccctagaatattggcaatctgttttatcagaagtccaaagagtattaaaaccaggtggatattttgtatttgatattcttaactcagaacaaccattagcggaagattgggcagttttagaaacctatttaggtgcagaagtgtttttagaaactgcatccgattgggaaaaaacaattaaaaatgcaggtgcgaaaatagttaaaaagcaattaggagaattatttgaattgtacaaaatcagattttaaaagttcattaaaatttcacttattcaacctcttgctttttaacattactacaataaacctaaatctttcaaactactgcgtgtaatttcaattcgtgcaggtaaatcttctcgtctattaacatcaatatttgtagcaaaaaaatagacattatcattttgttccaaataaccaacaaaccaccctatttgttgtttactctgagaggatgttttaaaagtctctcatgactgtaaattaatactaattcacaacgtaagtttctagttaactaaactatctaatgatgaatcaataaatcttgattaaaaatgctcataaattttgcggtgacagtgtatgatttgtgaagattgtaccgataatttgaattttgcccaaaaagccgcaatgattattcgccatgccacagaaacagacttaccagaaattgtagccatttataacgctgctgttcccacacgcatggcaacagccgatttagaacccgtaaccgtagaaagtcgcattgcctggtttcagggaagagtaccttcacaacgtcccctgtgggtagtagaaatagatgggatgattgccggatggctgagttttcaatcgttttatggtagaccagcttaccattccaccgccgaaattagtatttacatttccccaaactttcaaaaacgtggtttaggaaagttacttttagaaaaagcaattaatgaaagtccaagtttggggttaaaaactttagttagttttatttttgctcacaatcaacctagtttaaaactatttgctaaattgggttttcaaaactggggatatttacccaaaatagctgatttagccggcgtagaaagagatttaattattctgggtttacgagttggggaaaagtgaaataggtgataggtgactggtgattggtgactggtgattggtgactggtgacaggaggataatattaatttttgtctattccctattccctgttctctattccctgttccctaataattaacgagaagttaaactatcaaagcgatattcagtaccaatcctgagtctattagcattgtactcaggagacatcaacagcgaagaattgtaaggattgggtaaatcaggggtacgaagataaggatcattctgtgcttgctgcatgagaacatcatgatacacaatgttaactaactgaccatctttagctatttcattatcaggaaaagtagttccaaacttacccccaggacctaataaagaatctacctgacgctgtaaactgccattgtcataaaaattaggattattgcgaaaataagctctatcgaaagcattgctggttgattcataattttctgtttgcatctcagcaactgcaactacaggaaatgtagtagtagcaagtagtaccatcaacccacccaatccaggcaaatttatactcatgtttacaactcctcaatttttaggcaaacttgggcaactcttaatttatgcttaatttcagaactttcattagttcaacctttggtgtagcacaacttttaacggtttgtaatgtcgtattctactgaaacatctaacccatcggatatttgggcaaccactactgatttaactaccctgcgtcagaagttactaaatttattttgccaacttgcttatcaagaaggtgattttgttctttcctctggacaacgtagttcttactatattaatggtaaacaggttacactgcacccccaaggagctttagctataggtaggttgatattacatattctaccagtagatacacaggctgtcgccggtttaactctgggtgctgaccctattgtttccgctgtcagtgtggtttctgtctatgaaaatcgccccataccagcgttaattattcgcaaagaagctaagggacatggcacaatggcttatattgaaggtcctactttacccacgggtgcaaaagttgtagtcctggaagatgtagtgacaactggccaatctgcactgaaagcagttgaacgtttacaagcagcaggttataccgttgatagggtaatttctttgatcgacagacttcaaggaggcgcagaattatataaatctgctggtttacagtttgatgcgctcttttctattcaggatttacaagcaaggtatcagcaaatataggggactggggactggatactggggactggggacacttcgacaagctcagtgcatcgctggggactggggactgggttaaattatccttgatctcctgactcctgactcctattttaagaggtgaaattatgtctcaaaataccattaactacatgattcataaatccaatttacggggtcatagtaaaattgattggttggatagttatcatacattttcctttagtcatttttatgatcccaaccgcatgggattccgttccctcagagtcattaatgatgacagtattgctgctggtgctggttttccaactcatggacatcgagatatggaaattctcacctatgttttatcaggtgcagtagaacataaagatagtttgggtacaggttcggtgattcgtccaggtgatgctcaaattatgagtgctggtacaggaatcatgcacagtgaatttaatcattcccaaactgaagaattacacctgttgcaaatatggattttgccggatcaacaaagtttaaaaccaagatatgaacaaaaagctttttctgtagaagataaaaagggaaaactaaggttaattggttctcaagatggtcgtgatgggtctatcactattcatcaagatattaatttatatgcctctatcttagaaaaaggtgatgtgattaattattatgttcaaccccatcgttatgcttggttgcaaatagctacaggtgcagcaatctttaatggaaaacaactccaagcaggtgatggagtgcaaattactggagagcagaaaatagaactgagtacaaatgagaacgcggaaattttactttttgacttggtttaaatagggtttgctgaataaacctaaaaccttgatatatcaaaggttagaggctgataaacacagaaattagtgcaagggttttgaagggtataccggaaaaagtgtgcattttttgggatttcaagagatggcaaagaaattttcaaatctcctcctgactcctgactcctgactcctgactcctgactcctgactcctgactcctatgccctcacggaaagactttctcagcaacccctaaatagggtctgctgtatcgaaaacagataaagctcggctaacgcgtagcgtgccgttatgcataaaaagatttattaacggattggggcttttttctcaaattaatgttgtgcttctataaggtatttaacaattaacaaacaatttctgttatcagaatcacgttcataaacaacatgatctgccacacgccgaatgagaaaccatccatatccatgatcttgtaaagtacctggttttggttcaggtatctgatcaggattaaaaggcttgccgtaatcccaaattcttatttccagtctgtctacccacagactcaattcaatttctatatttgtttctggcggtaaagtccgatgagcatgacgaactgcattagtaaagccttctgctaatgctaaattgagacgatagagttggctttctgaccaacctctttgagctaaatattgtagagaaaaattttcaaaccattgttgcacttggttttggagcttcagatcgctcttcaccgtcagatggtcttgctgcactgtagtaagcattgaccgtgactagaatattaagtaagtaaaaaacgtaacttgtgtttgttttttggtggctttagattttggaatagcttttatggcaattagcagttagctgtttcaaaatcttgtttgaaccaagatcccagaatttaaaatattcctagttactctggcaactgctatatttttatattttacacccaaaactaaaaatccgatcttcaaaatagacctatgaaaattgacacctgtgagttttcaaaagcatattcgctagaagtatgagtagctaatgggctgtatattccttgcggacagtctttagactcataacttcggtatatgctcttgaaactcacaggtgtcacagcactttatggaaactaaaaattagtggcaactaatttagaacagtcccaaagtcagagatttgtctaagggtaatgcagcaccaatacctaaccagatggtgacaaaagtaccaaacaagaatactgttgtcgctactggacgacggaaggggttttggaacttgttaacgctctcaataaagggaacgaggatcaatcccaagggtacggaagccattgccaatactcccaacagtttgttaggtagtgagcgaagaatctggaacactgggaacagataccactctggcaaaatttccaaaggtgtagcaaaaggatttgctggttcacccaccattgctggatctagtatagctagagccacaatacaagcgaatgaacccatgattacgatggggaatacatagagcaggtcgttaggccaagctggttcaccatagtagttatgacccatacctttggcgagtttagctcttaaagctggatcgtttagatttggtggtttatgtgtggacatttttagatctggtctcctgcttaagtgaagttaaagcattcgtgtaagctattagctatttaggcaagccacaaatttattatgacactggattcagctttgccagttgaagcaagtgttcattgtgtttacagcttacggtttcagcgaatagtgcttgtttttattctgaggctatgtgccttcagtttaaaacaaacaacttgcatctggaaactgttttacctattcactgaatcactactgactaacttttgattacaatggtccagaaattccttgtttgcggatcattaagaagtggaaaagcatgaataccgcaattaaccaaggtaatacgaatgtgtgggcgctatagtagcgggttaatgttgcttgaccaacgctagaaccaccacgtagtaagtcagaaatcaaaacaccaactacggggattgcttctggtacaccactaacgattttcaccgcccagtaaccaacttggtcccaaggtaaggagtaaccagttacaccaaaggaaactgtgattactgccaggatgacaccacttacccaagttaattcgcggggttttttgaaaccaccagtcaaataaacgcggaaaacgtggagaatcatcattaataccatcatgctggctgaccagcggtgaatggagcgaattagccaaccaaagttgacttcattcatgatgtactgcactgaagaaaatgcttctgcgactgtgggcttgtagtagaatgtcatcgcaaacccagtggcaaactgaatcaggaagcaaactagggtaattccacccaagcagtaaaagatattaacgtggggaggtacgtacttgctggttacatcttcagcaatagcttgaagttctaaacgttcttcaaaccaatcataaacgctggccatacaatctcaagttcctacaaattgcttgtggttgataaatatcccaagattaattttgtttgggatgttcgcaaagagaatctttgttacagaattattaagtttttcagaaacttaacattctgtaaatatggaatatattgcgatcccttggcaagccaacgtgaaaaatgttggttacaaagagattttatcgtttttgaggtggatttgcttctccagagttgcttaacaacttaatgagaaaatgcacctcttctataaaaaaagtaacataatttagagatatatttcatcagcaacgtcccaaatggagattgatcagtgatttgggtaaagatacaaggtaagatgggcttcatgaataaacaggtttttcggtgcggattttccttgcttttagcttttggattggcttttggcttgacttttggctcaattccaccagcaaatgctttaactcaacagcaaaagttagtttctgaagtttggcgaattgtcaaccgatcttatttggatgaaacatttaatcatcaaaattggacagaggtacgacaaaaagcttttaaaagtccgctgggaaatgaccaagaagcatacaaagtaattcagaatatgcttaaaagcctggatgacccttttacccggtttctagacccagagcagtaccgcagtttacaggtgaatacttctggagaattgacaggtgtgggtttacaaattgccctcaatccccagacaggtattttagaggtaattacacctatagaggggtcgccggcagaaaaagcaggtttaagaccacgtgatcgcattttgcagattgaaggaacatccacagcaaatctgactctggatgaagcggcggcgcggatgcgcggacaggctggtactgttgttactctcttaattggtagagagggagaagcagataaagaaattatactggtgcgcgatcgcattgaactgaatcctgtagtagctgatgtgcgtttatccccccaaggaacacccattggctatatccgccttactcaatttaatgctaatgcaccaatggaattagcacacgctattcatattctaaaacaaaaaagcgcagcagcctatattctagatttgcgaaataatccagggggactattacaagcaggaattgaagttgctcgtcagtggttagatgaaggcacaatagtttatactgtcaatcgccaaggcattcaaggggattttgaagcttatggtcaggctttgacagaagctcctttagttattttggtcaatcaaggaactgcaagcgcgagtgaaattttagctggtgctttacaagacaatggacgcgcccagttagtaggtgaaactacctttggcaaaggactgattcagtcgttatttgaattatccgatggttctggtttagcagtaacaattgctaaatatgaaacaccaaaccaccgagatattaacaaattaggtattaagccggacatagtaattccccaagaaccaatctcaggggagcaaattggcacagcagcagatggacaatatcaagctgctatggaactgttgagcaaagatttgctagtagcgggttcataaggagtcaggagttattaattttggattttggattgtttttgtgatctccaatctaaaatctaaaatctaaaatctaaaattttcctccccagtcaccagtccccagtcaccagtccccagtcaccaatcaccattccctaatctctgataagcttggtcaatgatgcgtttgtcacggaggaagccaatattagcgccggggcaaatgtattgtagagtttctggtgaaaagcgatcgcgcaatgcttgaacacttttaagttgtctaggccaatgaaaagtttttgccgtgcgaaatggcacaggttcaccttgcaagttagggattaaatgccgtcctgaaaataaaactcctccaaattcacgataatatagacatgaagaccctggagaatggccaggtgtccagataatttgtgtggtgtcatcaagagtcaattcttgagaaaaggtagtaacagttaaaccaggtaacaaatacgcttcttgttcttgaatgataatctcacaattaagagcttgttgaatttctgctactttggcaatagcaccacgatgagtaataaacaacgaacgcacaccaccgtgtttaagcggattcccacccaagtcttgcccaaaatcatccccaaaatcatggttaatttgctccagggctgggcagtcaatgagaatattaccttcatttcttacaataagataagaagttccccccaatgtgtcccgatttggtggaaaggcaataattttattgatccccaagtcggtagattcgggagatactgatcctgtttccatcgaagaagatagaatttctcctttgggcatttgtccagaaagtataatttgtgggggcttaattttatgaattggttgttgagttgaggaaaacataaattaaataaccgataaataaccgaataaatagagtttttacctaagttctatatttaataatctacagatttatcaaacattctcactcctgactcctgtacgggcgaagcattcggaaaatagctttccataaaaattgataattgattggccgaatgcttcgcccctacgactccttgaattccttgaactccttgaactccttgaactcctgaaataaaatggcattttggtttttacttttactgggactagctacttatctgatagtgcaacgcagcgttgctcatatcacccgcaccccagtgtggttattgtggctagtattaatgacaccagcaattatcctcactggttggacgctgatctatggtacacaacaatcacccccaccagaattgattatttggccgttgcttatcagtttgctgttatactggatattatttctgtcggggcatcgagtcccagaaaacacccggactgatccccaagcaacaggaacacaaccagcaaataatcctaccgcagaaccgttaccagtgcgtcctattgaaccaacagaagaaactaatctgcgaaattgtttcccttggtctgtatactacattcaaaatattgagtatagaccccaagcggtgatttgtcgtggacagttgcgaactgcaccgcagcaagcttatcagcaaattaaaacaaatatcgaaggccaatttggcgatcgctttctgttaatcttccaagaagggatagatggtaaaccgttctttgttctagttcccaatactcaagctgctagacaaaatacaaaaaaccgcaatttagaaaatttcagtcaagcagtaacagcactaggattgttgttaatgactttaattacaacgaccttaataggttcgcaaattgcaggagttgaaccaacacaaatcaaaactgacttctcgctcattttcaatggtttaccctatgctttaggattaatcactattttgggtatccacgaacttggtcactattttacagcgcgatttcataaaattcgctcaactctgccttattttattcctgtaccttttttcttgggaacttttggtgcatttattcaaatgcgaagtcccattcctaaccgcaaagctttatttgatgtgagtatagcaggaccaattgccggttttgttgctactttacctttactgctttggggtttagctaattcagaagtagtacccatcagcgacaaaacaggacttttaaatcccaatgctttaaatcctaaatattcaattttattagctttactttcaaaaatagccttgggtagtgaattaacaaccaaatctgctttagatttgcatcctgtagcagttgctggatttttaggtttaattgtcacagcattaaatttaatgcccgtaggacaattagatggtggtcatattgttcatgctatgtttggacaacgtaccgcagttgtaattggtcaaatttctcggttgtttttactaattctttcttttatccgtcaagaatttttgttgtgggcaattctgttactatttattcccttggttgacgaacccgcattaaatgatgttacagaattagacaacaaacgtgatgttttgggtttactagcaatagctttattattgttaattgtactgccacttcctgaagctttggctcgtgttttgcagatttaaaaataggtgaacaatggacaattgataattgataagtgataattgataattgataattcacaattaatttgggttaaaacctctcttttgaggaagaggtaactttttattctccattgttcattgtcaattgttgaagctaccactaattgcaatataattagaaattgtgtgaatctgcgaggataagaatgactgctgatgtaactgctcatactttatttgtgtgtaaaacctgcgctagtgtttggcaagatggtaagcgtgtcggtgaaagtggtggtcaaaaactattacaagaaattcaacaagtcgcgcaaaattggcatttacgggatgagttccttatcaaagaagttgattgtatgagtgcttgtagtcgttcttgtgtagtcgcttttgccggtcaaggtaagttaacttatttattcggtgatttgccagttgatggttgcgcggaagcagtgttggaatgtgcaagtaaatattacaatcatcctaatggtgttttaccttggtcagaacgtcctgaacctttgaaaaagggaattttggcaaggattcccagtttataggtgactggtgactggtgactggtgacagtggtaaaagctttccattgtctaagttgtggttttggttaatgttctggcggccttgtctacggttatcaatctaaggttatcaatctaaaatccaaaatctaaaatctaaaatccaaaattgctatgttgcgcgttttaattctgggtggtactggtgatgcagcggaattaaccgcgagaatcaataatattactggaattgaggcgatcgcatctttagctggtcgtacccgtgaacctgttgcacctgttggtaatgttcgcgttggcggttttggtggtgtaacaggtttggttgaatatttacaacatcaaaaaatagatgtgttaattgatgcaactcatccctttgctaatcatatctcttggaatgcagccgcagcagctacacaagtgggtattcctagattattagtaaatcgtcccccttgggaaaaacaaccgggtgatatttggattgaggtagaaaataatacagaagcagcagcagctttagaaaatcaagcacaacgagtatttttaactattggtagacaagaaatatctgcattttctcatttacaggaaatgtggtttttaatgcgaatgatagatccaccaaatgcagacgtggtgatacctcctggtttaatgttatttgatagaggaccttttactttagaggatgaaagagaaattttaactaaatataatatagatactattgtgagtaaaaatagcggtggaaatgccacatatcctaaaattattgcagcgcgagaaatgggaataaaagtggtgatggtgaaacgtccagctgtaccaccaggagaacaagttgcagatgtagaaagtgcagtaaaatggttattggagaaagtgggaacttgagaaatttctgttgctatgataatcaaaattgattctagagagtcgattcagtaggggcgaagcattcgggtgataacctattgctgaaaccattaatattctgtccgaatgctttgcccttacaattaattaatcggtgttctagtcttcataaaccccaacaaataaaggagttgtagatactgaaactattctattgacttgatttcgggaatttaacatcaagtaagtttcttgtagataaaatgtctctccaccattatcaatgggattactatataaaacaattttattttttaacctttctgtttttgcaaaagatttaccatcattaaaagattgtttgacaacagaagtgttgaatgttaagaaatctgtgataaaaatagcccaaaatatattaaaatttgagcaagctatatcaaaatattgatttgatcatgattataaattcatttcccaagattgtcaaagaca

SEQ ID NO: 89 - DNA, 17777 bp, Sphaerospermopsis sp. LEGE 00249
  LEGE00249_107
gggtaatggggactggggactgggtaatattattcccaatcactaatcaccaatcaccaatcaccaatcacctacgacggaggacttctaatagctttgtaaaggtttggggtaggggtgcggttacttccacccaatctccagaaatgggatgctgtaacttgagtcgccaagcgtgtaatgcttgaccgggcaaatttacccccacagaacgaccagaaccataaacagggtcgccgactataggatgaccgattttggcactgtggacgcgaatttgatgagtacgccctgtttctaactggaaatggatcaaggtgtagttccccagcctttctttcacttgccaatgggttatggctgacctacccccctcttctatggggactatggccatttttttgcggtcttggggatgacgaccaatgggtaaatctacagtcccgctttcggtttttggcgcaccgtaaaccacccctaaatattctcggcgtgctgtttttgcttgtagttgtgcttgtaggtgttgataggcaatatcagttttagcaatagcgatcgctccagttgtatctttatctaatctgtgaacaataccaggacgttgcacaccaccaattcccggtaaattaggacaatgtgccaacaaagcatttactaatgtaccatctgcgtgaccaggtgctggatgaactaccaaacctgcgggtttattgagaatgagtaattgctcatcttcgtagagaatatctaaagggatatcttctgctaccagttccaacggttgaactgcgggaatttctaaacaaatgcgatcgccaagtttgagatttatttttttagatgtacaaacttgatcattgacttgaacatgaccctgttcaattaactgttgtacacgggaacgagataaatcaggtattgcagatgacagataacgatccagacgttcagttttctcttggactaaaagattaatagcggtcacagttggttaattttaaacagctaagtatatgaaaattctactgatatcagggaatggtgattggtgattagtgattgggaataatattacccattacccattacccagtccccaataccctaaatcatcctgatagtgaattatgaaagaggaaaagaataaattaagcactgtatgagtagaaatagtccgggatatagtatagctaatttacagtacatttgctttgtagtcattagctttactagcttaaaaggactattgattttaagcacaaacatcttgtttgatcagcaaaatcaggtgaaacatagtatttttcaagaatggacaattgacaatgacctctccctgaaagtcagaggattgaaaaagcggattttttttggttttttccccttcaaaggggaggttttaaaccttgaatgaaacaattatcaattgtcaattgtcaattatcaattgataaactgctattttcattactaatttttgtcttaactttaattttttatattaggtttaaaatagttttttatttccctgttaaatctatagtaacgtgaaattagtaggtaattactgagcatctacacatataccacataatcattcaaggctggaatacaaaaaattagaagtaatggagaaggtgtaacttttctgaacttaatgcttctaaatctttgctattctcatgtcttacacctttatattattggggaaattaaagtctataacatccaatgatgtcgtagattgagcattgccaaccagcccttatggaaaaagtgcaggatgtggatcttgcccatatgactgctgataggggaatgcttagataatttctgctttttgcccaggtgaggggtgagtggggtgtggggtgttgggtattgtgtgtttagagaaaagacttgctatactcactcccatgtaaaccgttatctttatctggcatgaagtccaaaaagaccggtgtgaatcctctacaggtgattcacaaattgtgatgtcaaatttttatttgtattcaaatccatgctaatgaaaacgcttcctattagtagatacagatttttccaaaaactacaacctctatccctgttgaagaaaatcaccagtaagtcggttactggttgtttagaggtatttagcacttccggggcttggtcaatatatgtacaagaggggaaattaatttatgcttgttactcagagaagatgtttgagccactgtatcgcaacttgcagaggttgacccagaaaaattctactcttcccagaggtattaatgagcagttacaaagcatctttgaaagaggtgtggaaaatcaggctattcccaatccagattatttagctatttgctggttggtgaatgagcaatatattagctctatgcaagcggcaatgctcattgaacaattagctctagaatttctagattcatttctgcaaatcgaagagggaagttatgagtttatccatgaaacctttttggatgatttacccaagttttgtcatttgaatctgcgcttattagtggaaaagtgccaggcggggataaaagtttctcctgaacaattttggcagtatagtcagcaatcttcagcaggtgtcagagttgctacggagcagttttggccagacaatgaaccaaagacacgccctaaaattgaagtacaattgcccccaattggcaataaaccaccaactcccagcaaatatcaaagattttattcccaacccaaggacaaaaaacattacacaattttctgtgtggatgatagtcctttggtgttaaatactattaaaagttttttagatgagcaaatattttctgtatttggtgttacagattcagtaaaagctttgatggaaattttccataccaaaccagatatgatttttctggatgtgacgatgccgaatttagatggctatgaaatttgctctttattgcggaaacagccatattttaaaaatacacctgtaattatggtgacagaaaaagccagcttgatagataaagctaaagcaaaactcgttagagcttcagcttgcttgactaagcctttaaatcaaagtgatttactgaaaacggtttttcagcacatgatttaaagcagataattgaaagtagatgattgaaagtagaaaatataagtttttctcgatctagattacactggacgacaattagataaaatactgtgcatcttgactactgctccaatgactgcgatcgctggcgcactaaatcccgtctcttcaacttgttgcacaattgtccctaactcaccaattaattcttcttgttctggccgggttccccacctcaccaaacctattggagtctctagactcaacccagatgaactcaactgttccacaatataaggtagattgtggatacccatataaataactattgtttctgaaccttgggcgatcgcttgccattttatagtcggtcgatacttacccgccgcttcgtgacccgttacaaatgtcactgatgaactatacagacggtgggttaagggaataccagcataagccgccgctgcaatgccggctgtgatccccggcacaacttctacagaaattcccgattctagtaactctgccatttcttccccaccacgcccaaaaataaaaggatcgccaccttttaaccgcaccacaatttcatgatcttgggctttttcaatgagtagttgggtagtttcttcctgtaagagcgaatgtctccccatgcgcttaccagcgttgattttttcagcttggggattgatcattgccaaaaccggcggacttaccaaagcatcataaataactacatccgcacattccaataaacttttacccttgagagtcatgagtccaggatcaccaggaccagcaccgattaaataaaccttacccaaaaactttttccccttctgttgctaaatcccagattatatcagctagttctgggctgactcctaaaggtggtgctaattgcaactttaccccaggaaattttaattttagcttttctaaagattcggcgatcgcatcagttattcccccagtgaataaaaaatatggcaaaattgcaatctgctgattaccagcagctactatttcttttatctttgtttctaaactgggagatacagaccaataagccgttactgctcccaaactcctagctatatcttctactggttgttgtgaaccagaacgacgactaccatgtgctaacagaattactgcctctgcttttatagtagctattgttgaagtcagcagttttgctaaatttccatgacttcctaaatagggtttaatctcaatctggatcttttcacccagtgctgtttgtgcaagttccacttctgcgggaatatctgacatgacatgaactcccggtagcagaaataaaggtataatttttaggcatttgcaaccaaaagctaaagcctttggcgcgaaatcttgaatttgctggtttaatggttgagtatttagctctagggtagctatccctactaaatgttcactatctggtaatttcagactgagcagctttgctagttgctgcatagcaatatttggacgcgaatcacgactaccgtgagatactaaaagataagcagatgacataggctgacgatgtgattaactaaaaatttaggttaaggagtatttattatgaaagaatttatgcactctttagaagaattagtggacaaactaacactaggtgcaattctagagatgttagaacgaatctgccacaaaaaagcagaaaatctcagaactcactggaatgatgaagaaaacgccaagttatgggaaaaagcggctaaacaaatcgaaaatatcaatgtcgatatttgaaaagagcagcactcaaagtattcatgtgttcccagggtttagtccctcccacccaaggatgcgagggtaaatttcctttggggaatgttttgggtgctggccagggaaaaactaaattctgattataagaactagattttgtgagatcccagccaacagcagcacaaaatcgaggataatcttgaccacagctttcatatatttctatttgcacactgaaaccaaaatgaccttgactatattttgtccataaatgatcaattatctgtaaatcctcagatggtaagttttctaaatcactattaaataaatattttcccacaggtttagataaagcttgacgcagcactgtccaggtttcatcatctgctttttgccattttttgaacttgagtaatttttctaaccttttgtaattaactccggcggctgaatataaggtattgtgaagattaattgatttttgtttaactggttttatttctgtgttgactgctgctaaaacttctgtagcagactggtaacgttggggtagggcattttgtagcagtttattcagaatagcactcaaacgctcggaaacttgattttccggtaataaataatcttgccatatccagcgatcgcttgtcacatcaaataaatcaaagggagaaacacctgttaataagtaaatgcaagttacacccaaactatacaaatcacttgctgctaaggccttacccctcatttgttcaggagccatatattcaggacttcctaccgttgtaccagtatttactgaagctgtagcggtgatttgtttcgctactccaaaatcaattaaaaccaagtttcctgcttcagtattattgttattacggttttttattttactgggttttccaaagtttttgggttgttgttgagcattgaaagattgcaattcacccaaattcatagtaggatttaatgattctacctcagtaattggtggaggatcttcagatgtattacctaacaatgaaatatatcttctcataatatttgctggtttaatatcccgatgtatcacttttcgagtatgaataaattccagcactggtaataaatctttgagtagttgccaaatatgcacttcagcaaatacaccttgctcttgtaattcttgtgctaatgtcttgcctacaattaattcctgtactaaatatagttgattgtcttgttcaaagtgtgcaagcaaatgagggatttggggatgttgtaattcatctaatctcactgcttcttggtgaaataattccaccgcttttgcaaaagtagttgtattcgtatcaggaaaatataattgtttaattacacatttaactttagatggtatatcctcatctacagctaaaaaagttctgccaaaaccaccgctaccaatgggataaattggacgatagcgttctttaagcagtaaaggctttccacatttgatacagaaacgagcattgtccaggttctgtgggtataaacaagcaatacaacaagtcattagtcataggtagatggggaggtaggggaagctcgcaagggtaggggaagtaggggaagtaagggaggttaataacccagtcaccagtcagcaatcaccaatcccctatttcttttctgctttataagtataaaagttgtcaaatgcgcctactgtttcaaatttgtaaccaggtattaaattatcaatttttaaatcagtagtataaagactaaaaacaatatagttctgtctttttgtggtggcagaaataatatctttaatttgcggttgagcggaatcaaccagctgattgcaattaaattgtatcagattttgcaaaaaattcggtgttttttgacaaaaatctgtttttaagtaagttgtcaaacgttgtactgcatactcttcatatttaggctgttgtggatttgtggtagccatcgtcactcccaagactgctattcctgctgcgcctacagatgcaattaaagtcaatactttcatatataccaggttgtgatctaatgactacagtttaaagactacaaaaaaaattagtcaatttcagtcaaaaaaaatcttgattattttttaaagtcgtgctatgctcagagagtaaatggcgagcgtagccaagtggttaaggcagtggattgtggttccaccactcgcgggttcgagtcccgtcgttcgccctagtgataaattattactttctgtggtttcaagcaacgcgaggaaagaaaacaaaaaggaaagtaaattaatattggctctgtttttactcagtgctgactaatacaatagacctctccaaaatagaatgtattaatttgtcataagttgtaggggcgaagcttatggatgataatttaacggaaaaatcagacatctagatatcccataagcttcgacctgcccccataaataggttccataatttcttttctggagatacagcataagtatcgttaattagtaggggactggtgactggggggaataagatactacttcttccctcctgcctcctaaattgacaactcccaccaagttttttgaccaacaataccatctactaataaattacgttgactttgaaaagctttaatagctgcttcagtaagaggaccaaatataccatcaactcgaataccatagccattagataccaataaacgctgcataattcttacagacataccagaactaccaaaacgtaaagttggcatgggttgtctgttatgtgctgggtatcgtgctaatagctgctcttttgtagggatatcctgagcatcagctaactcaaaagatattgagggcaggtgcttttgtcgaatttgttttaatatatgatcccgctgatgtgccagtgctgaaatttgaggtttgtcccttccgtctactgtcataaattcaggtggtgtgatttgagaaatagaagttaattgagataactgactattttttgaattatgcacgccattttccgttgtcaatggtcgctgctccggcaaatggggcaaatttggttgtgtggtgcttaatacgcccgtcattagcaggctaatttcagtcattttagttcatctgatattttgtacctataaggataaaccaggagtagacaaacaaatagtgtgaaactgtaactctcgtccaacaaattattttatgtaagctaaagtaataaataatacaactaattacagtgtaaaaacttatttattgggaaatttgattaatgttagtagacgatgattctatcgaagaaaagaggtttttaggttaatttacttttctttacatactttggttgtttcccgtctttctacttatcaattgtcaattgtcaattatcagttgataacagtaatatctaactgcaaattgtcaatttttgtgtagtatatattactatgttgtatttacacaattaagctattgctgagtcatatttataacgttttattactttatcactttaccagtctaggagttcttagttaattttagcaaaaaaatattgacaaaaagtttattttacccatagtacagcaacataattgcaacaattgggtgtaaaacccggctgagtcccgcaaagctaacaccttttcaggcaaaaattttttgaagcggttatcatcaccgttaccaaaatacctcttccagtccccatttcccaataagatacattctggtgttaggataaccgtgacgacaaaaatgcaaataaatgtaaacaatatatattaagttcttaaaaactgaatttacttaatcaccttatttccagtaggtagcttcatgtccatcagtaccatcgctcctgagcaggttaatcgcattgttgggaatcagcatcatgatccgtttgaggtactaggttcacatcttatagaacaggaaggtaaaaacgtctgggctgtgcgagcttacctcccaaatgccagcgcagtttatgtagtagttccagaaggacgcaaagaatatcccatgacaacggtgcatcatccccatttttttgaatgcaccatagaaacaccagaacttaacaactaccaattacgaatcaaagaaggagagcatgagcgagtcatttatgatccttatgccttccgttctccccatttaacagattttgatttgcatttatttgcagaaggaaatcatcaccgcatttacgaaaaattgggagcgcatcttacagaagttgatggtgtcaaaggtgtttatttcgccgtttgggctcccaatgctcgcaacgtttctgttttgggagacttcaaccactgggatggacgcaaacaccaaatgcggaaaggacacacaggggtttgggaattatttattcctgaactgggtgtgggagaacattacaaatatgaaatcaaaaattttgacggacacatttacgaaaaatctgatccctacggtttccaacaagaaccacgtcccaaaacagcatctattgtcagtgacttaaatgcttacagatggactgatgaaaattggatggaaaccaggagacatactgatcccctcacccaaccaatttccgtttatgaagtgcatttagggtcttggttacacgctgctagtggcgaaccagcaaaattgcccaacggcgaaacagaaccagtagttattgcttcagaactcaatcctggggcgcgtttccttacctatcgggaactagcagccaaactcatcccctatgtcaaagacctgggatatacgcatatagaattgttacccattgccgagcatccctttgatggttcttggggttatcaagtcacaggttactttgctcccacttcccggtttggcagtcctgaagatttcatgtattttgtagaccaatgtcacttaaatggtattggtgtactggtagattgggttcctggacatttccctaaagatggtcatggtttagctttctttgatggtactcatctttatgaacacgctgatccccgcaaaggtgaacataaggaatggggaactttagtatttaattactcccgcaacgaagttagaaatttcttagttgctaacgccctgttctggtttgataaataccatattgatggcattcgtgttgatgcggttgcttcgatgctttacaacgattattgtcgtaaagatggcgaatggctacctaaccagtacggtggtagggaaaatttagaagcggctgattttctacgtcaagtaaatcacaacatctttagttattttcctggagtcctttccattgccgaagaatctacttcttggcctatggtgtcttggcctacctatacaggtggtttagggttcaacctgaaatggaacatgggttggatgcacgatatgttggattatttcagcatggacccttggtttaggcagtttcatcaaaacaatgtcacctttagtatgtggtacaaccacagtgaaaacttcatgttggcattgtcacacgatgaagttgtacatggtaagagcaatatcatcggtaaaatgcccggtgatagatggcagaagttagctaatgtgcggactttatttgcttatatgtttgctcaccctggaaagaaaaccatgtttatgagtatggagtttggccagtggagtgagtggaatgtgtgggcggatttggaatggcagttattacaacatgaaccccatcaacagttaaaagcattttttaaggagataaatcatctttaccgttctgaacctgctttatatactcaggattttgcgcgggaagggtttgattggattgattgtagcgataaccgtcacagtgtagtttcttttgtccgtcgtgctaaagataccgatgagtttgtagttgtggtttgtaattttacacctcaaccccattctcactatcgcatcggtgtaccagagaaaggattttatactgagttgttcaatagcgatgcgcgtaaatatggcggtagcaatatgggcaacttaggaggaaaatggactgatgattggtctttacataatcgtccttattccttagatttgtgtttaccacctttgggagttttgattctcaaactggatcaagaaaagactgcggaagcactgagttaaggtttaaactgggatgttgcggggagtagttgacacttcctgcttcacaatcccgtaaccaaagtttaacaccttgagcgatcgccccctgactactatctcttggtggtgctaagggtggttttactggatattcaccagtttgcgtaaacatcatcaccacctgccaacccaaagtagttttcgtcaaaaacaacctgtggaactgttgcaactccaccgcctttttattaatatactgacgttccagagtcgtgaaaaaaacctgctcaactccttcagaagcataattattagtattattagcagtatcaataccagggtttaaaggtaaaggttgaaactccggcttacctgccaccaaaatataaggatagatatcaacactgcgactcagacgacgggatctttgaatgacgcggttagcatagctaggtaaatctaacatcaactgagtagttaaaccttctaaaccttgctgagaacaagaactactcattttggaatcaacaggtttaggagagagatttttggcgaaaacaggagatacaaagacaaaagactgaaaaagccacaaaggaaaaagaaatactaaatccttaaaaacaaaccagccattttttcttccttcatcttgaaaattcatcaaattcaaaaaatcacatcttgtaaaaaatattatcgcataacttgggcgggcaagacttgtactgagcggttagtgagcgcagtcgaactatgccgaagtatgcccaccctacaaaaacttagaacacagtcaaaaaatctctctgaaacctcttatcttcgtgtccttcgcttctaccctgcggtaacaccttcggtgaacgtggtttgtttctctcttcctttgcgcctaccctacgggatctgctgacggagattgcgcgaaacaaaaacagagtaacctaagcaacctcttcacaaaccctattccaagccagaaccggatcagcagcagcagtaataggacgaccgatcaccaaaaaatcagcaccagcttgaaaagcttgagaaggggtgagcgatcgcttttgatcacctttttcagcccagctaggacgcaccccaggacaaaccagcaaaaaatctttaccgcaactgtcccgcaactgtgccacctcttggggagaacaaaccgccccattcaaacccgcatttttggacaaaagtgccatttctaaagcaaattcgggcaattccagaggtattttcaaatcaaacgccaaatctcgcgccgaaatgctagttaacagagtaatagcaattaacttaggcggtttagttcccgccttttctgctcccacctgcaccgcttctacagcagccttcaagcaatcattaccacaagtagcatgaattgtcaacaaatccaccccataaccagcagcagcacgacaagcaccggcgacagtattggggatatcgtgaaacttcaaatccaggaaaatccgcttttggcgagattttaacacatttagaatagccggacccgtgctagtaaacaattctaaaccaaccttccagaacgtgacttggggaagtttatccacaagagcgatcgcactttctaaatctggtacatctaaaggaactataattttttcatcattcataattctggttattacattcagttatagtagtcctattaagggtgaaaatgtcaacatctcatgatatcttccatccgcggaatttatctaacacgtaaagacgggtgttcaaaaccggataatcattttttggcaaggatttgaggatgtctttgacaatcttgggaaatgaatttataatcatgatccaatcaatattttgatatagcttgctcaaattttaatatattttgggttatttttatcacagatttcttaacattcaacacttctgaccttagaattatcttccactaattttattaatgggttagaatctctacaaaatgggttagaatttttacaaaaaagatatttaattaacaaaattgtagaagataacatattgtttgatttatctcccatttttccatttttagggaatatgtcagaaatttttgtgaagattaatctacatcatccccgcctgaaaaatctgatttgcggttaaatttaattcagaaaaaacttgagaaataacccgttcatcatctctaaatttactgatttgatattctccatctaccaaattacaaacagaaatagtaggttgtttgggattaccaataaaattacgtcctcctaaagctgcataatctataatccaatattcagcaatacccatttcttcataatcagcgtactttaaataataatcatcacgccaattagtggaaacaacttcgatgattaaaggtatggaagcaccattactaataactgattgttttttccataatggttcattagctaaattagcacgatttaaaactaacaaatcgggaaaataaccagaatctttaccttctggtctaactataacttgattaggtatcacatacggaagatttaacccatcaattttagcactaattttgatagttaaaaaccctttaacttcttcatgatctcccaccggttgccccattgtgacaattgctccatgatgtaattcataacgtatatcggaattgtcaggaagccagttaacaaattcctcaaaggtgacaattttatttagggtttgaatcatgactgtgaacaattattgatgatgaaaatattataacagcagggtgcgtcagatatcaaaagtatatttatttacatgacttctaacgtctgacgcactctacgagtcccgtacgggtgaacggctattctctcctactttactaaccgcacaaaattttttttacccacctgtaacactttaccatataaatcatcaggctgagaaaaaattaaatccacatcattaatcttatcaccgtctatcctgactccaccctcttgaattttacgcttaccttctcccgtacttttacacaaaccagaagcaccgagaataaaagctaatttagccggaaaatcaggtatagcagccaaagaaaactcaggtaatgctccctccttaccaccacttttcgccgcttctctagcctcattagccgcttgttcaccgtgatattgacggacaatttcccaggctaaaaattcttggcgatcgcgtgggttttctggcaaactctccaaaggtaaatccgtcaacaactcaaaatactgtgacagtaaattatctggcacagcttgaagcttctgatatttctgggaaggatgctcagaaagtccgacataattacttaaagacttagacattttttgtacaccatcagtcccgatcaaaataggtaataatagcccaaactgtggttttaagccaaaatgacgttgtaaatctcgacccacagcaatgttaaacttttgatcagttccccctaattccacatcagactccacagccacagaatcaaaaccttgcatcagtggatacaggaactcatggaggaaaatcggattctctttcttataacgttcagcaaaaccttccttggccaacatctgtcccaccgtcatcgtagacagcaactccagaattttccccaaatctaaacgggaaagccattccgagttgtaacgcacctccaacctgccaggtgtgtcaaaatctaaaataggacgtacttgatcaagataagtttgggcattttgtgccacctctacctcagtcaactgacgacggacatcagacttacccgtaggatcaccaattcttgcggtaaaatcaccaataatcaaaaccgccgtatgaccagcatcttgaaacgcccgcagttttcttactggtatactatgacccaaatgaatatccgcaccagtaggatcaatacccaacttgatccttaaaggacggtcagcattcagcaaccgcttttccaaactttcagtttcactatcagcatcatgaggttgaggaaaaatttctgccacaccacgatgtagccaagagaaattttgcgccatactagccatactataagattcactattaactacactttgcactttagaaattaggttggtaacgtccactggcaaattatccgttttctgttctgccaaactactataattgcaaaaaattaaccgacttttttcatttcatcaattacatttatatttattagtgaggaagtaaaaccgccgtgtcttctaggacttttgtaaacaagcaatcccaagaccaggcttcatctgggtttgaattttttaaaggcgtaggtcaggtaactggcgctaccctactatcgctcacactgctgtcaagttctattgcagcggggggactggtgggactggccataagtttccgcaacttgccagacgtgagacagttacgcagcttttctcccacagaaaccacatacatatatgacattaaaggtaaactcatatcaagcattcacggtgaagcaaaccgcgaagtagtacccttaaatagaatttccccgaacctcaaacgcgctgtactagccagtgaagacggtcacttctacagtcaccaaggcattaacccttctggtgtaggaagggctgtagtagtaaacttggtagcaggtggtgtaaaagaaggtggttctaccatcaccatgcagttggtgaaaaacctgtttttgtctcatcggcgggcttttactcgcaaattagccgaagcagttttagccattcgtttagaacaaattctggagaaaaacgaaattttagaaatgtacctcaatcaagtatattggggtcataataactacggtgtacaaacagccgcccggacttattttgataaatcagccgaatttttaaccttgggtgagtcagcaatgatggcgggtttgatccaagccccagaagagtttagcccctttgccagtatgaaaaaggcaaaacaaaaacaaaaagaagtgttagggcggatgttagacttgcggtggatcacccaaaaagaatatgatgatgccatcaaggaagaaattaaactagggagaattaggtcatttcaaggtagcgccctaccttatattagcaataccgtagcccaggaactggtgaaaaagtttggaagggatacaatgctgaaaggggggatgcgggtacaaaccaccgttgatgccaaattccagatgatggcagaatcaactgtgagtaagtggcacaaaaatttactaggtcaagggttgcgtggaaaccaaattgctttagttgcagttgatccccgcacacattttgtcaaagctctagttggtggggtagattctagagcaagtgagtttaaccgcgctacccaagcactcagacaaccaggttcggcttttaaacctttcgtttattatgctgcctttgccactggtaaatatgctccagatagcaccgtattagatacccctgttagctaccgagatggcaatggttggtacttccccagaaactacgatggtgggtttagtggtgcaatgtctatccgtaccgctttagctcaatctcgcaacatccctgtaattaagcttggtaaagccatagggatgaataaagttgttgaaacctgtcggactttgggtatcatgagtccaatggaaccagttacctccctgcctttaggtgctattggtatgactcccttggaaatggccagtgcctacgctacctttgcgaattatggctggcaatcaccagcaacagtaatagtcagaattacagatagtagtggtaatgtgttactcgacaacacaccaaaaccccagcgagttcttgatccctgggcatcagcagcaactatagatattatgcaatctgtggttagtagcggtacgggtaagggtgcagatataggcaggccatcagcaggaaaaacaggaacaacttcctcagaaaaagatatttggtatgtgggtactgtgccacaactcacaactgctgtctgggtgggaagagatgataacctacaattatccagtggtgctacaggtggtggtatggttgctcccatctggcgtgattttatggagcaagcccttaaaggagtaccatcagagaaatttaaaacaccttcccagtttccacgtcctaaagcaaattagagtgaggtaatgggtaatgggtaatgggtaatggataatgggtgatacaatgggtggatttaggattttggattgtatttcatgaactccaatctaaaatctaaaatttttaaaatctaaaattttttcccaatcaccaatcaccaatcaccaatcaccaataccctcatacctgtttttccaactcagctttcattctttgcagagtcatattcatctgctcaaacatttgttgtggtgtaacaccaaactgatttagctgagtttttagttgctgtatggtcatttgcgccataaaatcttctgatagctcgaaccgcttcataaagacgcgatatcggtccatcatagattccatctgctcaataaacagctttttgccctcgcggtcaaatttgccgtagttgttgccaagttgaatcagtgcttggtaatcttcaaaaagctgtttggcttcgtgttgaactatttcagagtcaaagaatcccattttacttatattcaactgagtgcttgtactcagtagctgaaagttttgtctctagtcttattttagtctagaggactaatctagagaacaaaattcgctggaagtacggttttttacagaaatttcactacttgactggggactggggactggggac

SEQ ID NO: 90 - DNA, 17752 bp, Sphaerospermopsis sp. LEGE 00249
  LEGE00249_108
caccattttctatataatctattactttttgtcttaaatctaaactataagccatgatttctactcccataccttctctcttcaatcttatactctttttgtctcattcttaagttaaactactataagtccgggatctattgatttttactctaaaccattaatatcaacacctgaatttttcaacaaatcccttaaccttgctatttctaattctgcatcatctgcacgttgtttttcctgttcagcacgttgtttttcttgttcactaacttctttatcagttaacagcaactcaccatctaaagtttcccaccgtaaccaaaccgtatccacacctctatacacaccttgccaacacactaaagctaattgcaatttcttactaatatagcgatttttatcatcacgggtgagaggttgatatactccctcaacaatagcaaaacccgcccaatcatcaggattaaaaggatcataccagaaatactccggtactcgcatccggtcttgataaactaattttttcttagttttatcataattagcagtgctttctgataataactctatcaccacatcaggggtttttccttcttcccaaactacccagctttttctttcctgttgtgatacatctaaaacacagaaaaaatcaggacctttataatcatattttttaacttggtagggactaaaataaacaaacatattccctgcggcaaaaccatcttgacgtttttctaaccaagggtagatggtttccaaaagtaaatccatttgatatttatgtcgcagagtttccataacgtcatcgtcatcacaggggagatcatgttgggtgggaaaattaatcagttgttcttctgagttggaaattgtttcttctgtggtgaatgggagcataattttattcactcctattttatctgttattgattaatcatatccgccaaagtaggggcgaagcattcgggtgataacctattgctgaaaccagttcatattctgtccgaatgctatacgcccttacgattaatgcatcggtgttctagcagtctatttactcatctaattctattcccaattgtcgcaatttagccgctaatttatccgcacgttgtttttcctgttcagcccgttgtttttcctgttcagcccgttgtttttcctgttcagcccgttgtttctcctgttcagcccgttgtttttcctgttcagcccgttgtctttcctgttctgcttgttcttctcctgttaacaacaaattaccatctaaatcccaccatcttaaccaaggtaactctacatttttatatgttccttgccaaatacccaactctacacccattttttgaattagataacgacccctttcattaggtgacattaaataatactttccctcaactaaatgatataattccaatgatgctttctgcacttcataaattccataaaaaggtactctaatcgctttttcatacacccaaaatttacctaaatatggcgtttcatccctttcttcagcaccattacctgagacaaattcaatcacaattaaaggagcgacaaattcttgccataacacataagaacggcgcatttgtccatttaaagttggcggtacatcaggaacataaaaccaatctggtgcttctgctcctttttgtggtggctcagtaatacgccaataaataccgctatcttgacctatacaaaattgtttatctggatgaatttcctgtaatcttgaccaaatagattctgttaataaaatactttgaggatgttcttgaaaatttttcacaaaagttccatcttcacagggtaattgagtatggtctggtaattgggtgggtagatcagttggcagatcaagtttcttatcaagtttcacagtgtccataatttcccattgtgtaggtttgtgttagctaggataggttatgacatggcattcacctgagtttattgtaaacaattcaatattagggcaaatattagggcgggcggggatgcccaccccaccatagttaaacttgtttagttcataaaatttaaatgcgtaatatctcacttatttagcagcttgattatttccctctgctctatttttcacatccgccaacacagtcttgtaatcctcccgatcaggatgcaacttcaccaaacgttccatcagagcgatcgctccctgattatcccccatctgtaacttcatcactgacaacttctccagcgccacctgattattaggttcacgctgcaaaaccaactcataacccttaatttgtttctctaacccagtctcagcagattcaaccaccgattgctgcggttgttgccaagcccgttgaatcgtactaaaccccccaaacaatatagaaccaccgaagcccaataaagaaatatatgtaacaattctttgctttcttgcaatttgctgacgacgtttttctaagtaatcactaccagaactagccatgtattaatacttgctgcggtaaacacagaaaaacagcaatcttcctctcctatttatgagattacccacaaaccccaagaaaatatcacagcctcctgtgcctcctgcctttagtcgtaattaccgtacaaaaccaaatttttagcaatttcccagaatcatttatgatatactctagaagttaagactagcttcgccaaactataggactcgcgcaccagtaaaaaatgccaactggaaagcagttttaactaagtattcacacaaataaaatttgaaccacatcgaggttatgactcagcaagtgattcaccctatggtgaaattgcagcgcaatgtgcaatcactcgtagaatccagtattatcaagcccagcgatagcatctggaaaattgccttcctctacggcaatgaatggcaacactggaaacaagaactcctggactttggctttagtatgcaagatcccattggtgatctattagcagtagaaacttgggacgaagattagggactggtgactggtgactggtgactggtgactgggaaaagaatttcacgtaattaccaattaccaattaccaattacccaatcactaacaagccatcaaagccttagccaactccttggcactttgaaagcgatcgcgtggtaaagcttccgtcacccgttcaataatttcgcgcagttggggagtaattgtcggcacatttttcacatcaaagcaacctccacgccctttgtggcggaaatactttaaaggattttcccccgttagtaaaaaaatcaaagttggacctacagcatacaaatccgattgtgtcaatggttgtcctcgttcctgctcaggagcgcaataaccttcagcgccgatcctcgtccctggtgcagtgccaatttccttcacagcaccaaaatccaacaccacaatttgattattagcatttcttaccatcaaattagcaggtttaatatcccggtgaatcagaggtggatcttggttatggagataatctaaaatatcgcaagtctgaatcatccaagcgatcgcctgatgaggagtcacaggaccagtagtatatacacgcttttccaaatcctgtccgtgaattaactccattgccaagtagtttttactatcttcggcaaaaaaatcataatatttgggaattcctcgataattaagacatttcagagttttcgcttctcgttcaaacaactcctgcgctttagcaattttagccatatccgcattcatctgctttagcaccaacagttgagaaacacctgtacttacacctgtagcatcccaagctaggtaagtagtacccataccaccctgtcccagtgtgcgtaagacctgataatggcgaattcgcttgataacagttagcggttgaccacagtgaacacaaaatatattatttggggaatttccttcgtgattgcaatgggaaactgcaactttctcaatttcctggtgtattggttgccaaggtgaaaccgtcagttccggtatatcctcaagttggaatttgagtataggtcctccctgagctagttgcagaagagaattatcggataacgtactttttgttatcagaacaccattaagaaaagtaccatttgtcccttgactaattacctgccaagcatcactgctgctgccagcactcaattgttgaagttgcagatgataccgagaaactaaactatcattgagtacaacatgattatccaccgcgcgaccaatgcgaatcacagaggaaccctgaaaactccactgtttaagcggcgttttatttttcgtgtctaacagggtcagtgttaccacaatcaaaatttataattcataattatttatctatcagaaaagagaactacttgtaaagacatggcctatcaacctcatttccattctatgtcaactttgccgatagggttaacagctagttagcatgagttagcttgtttgtatcggagaaaccttaacccgaatcaatagagccgtaatattgtcgtgaccattgtattcatttgctagatcaaccaagtcgctcagacctgattccaaatttgtactcgaactgagcaacggtgtgaggtgagtctgccaattagtttccaataaatcattatctgataacccatcggaaaccaacaacagcaaacaatcttcatgaatctcaaagaaattgatatcaggatggacaaaatcggcatctcgtggacccaaagcttgagtcagttggtaggcatctggacgagcataagctacactgggagataatcctttagcaatttcccgttgacccacttcatggtctacagtcatttgttctagaccgcccttgcgtgtgaggcgataaagacgactatctcccagatgggcaactgctaacttagtgttttgcatcaataacatcaccaaagttgtacccatgcgccccacaccagaacgcagtccttgttgattgagattataaatcgtttgattagctaacaaaaccgctgcttcgatcatttcagatgttggtagttcctccccaacccacttttcttgaaagtattttcgcaaagtagttacagccaactcactggccacctcacctccagcgtgtccccccataccatcacagagaatatacaaacccctagcttgcaaatggcaatttccaggtacatccagcttttgctgcttggtttcaatggcaaaataatcttcgttgtgatcacgttgacgaccgacatcagtgcgtcctacatcttccacactccttaattgcattggcaagataattgtcggtgcatcttcatttctttcctcatcctgacaattatcatcttgcaacaaagttagcgcagaagtatattttgtctctgtagaagcaagaccagagttagaaggtgattgtagttctgtggatatttcctccaaatgcgatcgcaattcttccccagtggcaatcttaccagcttctaaatcatccaaaatttccacaagagaggcaatatgagtatgttgagactgtagacataaattgcgccaaacccttcccaaagacttgatagttaaaggccgctcgccatcagtaggcaaatttttagtaggtgtttccagatccaaccgttgtaaccccagtgtttggtcttcatctagtcgcagatttgataacttcaacaaactttgacgacaattcactggtttcagtatctcccaaagttggatcatctgataacaccagtgtaaaatctgtagtggatgggtggctggatcttgccacgcctccagtaacaactgccaatgggaacggtcttcaatcagtaccacctgcatattatcttgttgccaagcatcgtgaattatgggtattcccggtgacatttcctgttgtaatgccacataagcttgagccaaactgggaatgccaattacactcaccgatggcacaatcaaaccctgtggttgatgttccagcatcgcctcaataggtgaaatgtgaaagggttggcaatctaaaactttgactttatactcagtaccacccgccatcacttccggttctggtaaaggttctaataattgatagcgttgtccccgatctaaaaatgagcctaccgccaattgtagacgggtgtttgtgttgcctatatctggtgttaatttttcttccccaaattcggaaacaacaacaggtacttcttgggtaatcattgcccaccaaatcgtgccacattctgcaccacacttgtgacagtattgattatttaaaaggacttctgccccacattcagggcaagtcttataagttaaagacgtgccacaactttgacaaaatttattgtcattggggttttcaaattgacagtgcgggcaaatgagcatagtagaaattccttgctttttcttctaagatgcttctagctattaaatatataacgtctctactgggataaaatctatccacaattactaacttactgccatatagttgtgttttatattctagtatgacttttgacttttgacttccgcgaagcggtactagctgtcttctaaattcataaaagcctatatctgatatagcttttgataatttcccattagctaacatcccggatacagtcaaatcctctatccctatcaccgggtggtttttgctaatataggggatgcggaataaaccaaaaaggctcataaaaaagacggtaggtgctttcgttatagagtcttgagtctgaaaaaccttgcacttttatgggcggacagaaataaaaaaatgtctttaattctccttctgactcctgactcctattcccatgacttacgtcacgctgcgcgaacacgaaaagactttctccgcaacccctaatactaatatatgtcgtgattttatgtaatgtatcttttctatagcgtttcccagtctcatgaggtacacactaatttatttactgttaccaattcccaattcccaattccctaagataaaaaaaatctgtacctcactaacttggtaaatgctgtaatattggctattttttggtgtaatctcgctaattcgataactcttaaagtcttacatgataagaaataatgggcaattaataattaagaatatctattactaattacccatttctcattacccattacccattactaatctctagattagcaaaagtagttgattactgtattatctcatgttggaagttttgcttaaattatcactgagtcatgtaatgatattttctctaataaaggtaataaaggtagtaaataccactatagccgagaatataaatgtaatctgaaatacaatttatacagcgaaaagcttaacaaaatctaaagaaaaatattttgtgacttaaaatacagtttttctttttctgtggcggttgaatacaaaaacaatctatttgaaaacaagaggataaatatacttgtctcaaagattaaagtacggggatcactaagaatgaaaacaaaagttacaggaaaagtaaatttatatatctaaagtgtgacgaataaaaatatgaagactaagataatgaataaggataagtacctgggcaaaattaatttaacatttttggcacaaacaaaaatctctgtattcctgatctgtatctgttccctgttaatagttccctgttccctctcccaaatataaaatttattttgcacgactacttacgtgaaatttttaaattgttaaatttgttaaaaaatagccgcctctgtggctataaatcttgactggctagagttacggatttttaccaacattatttaatccaggggttttaaaatgcaagttttacaaaaaattcattgcccaaattgcggcagtacagctgaacgtcactttattgctgagagtcaagtcaccagaacccaatgcccaacctgtgattacctgatgattagctgcactcgcactggtagggttattgaggcttatgcaccaggtatttatgctaaaaaataggtgattggggactagtgactggtgactgggtaatcaattttatttttcccaattaccaattaccaattaccaattaccttttatttcttctcagttgtccacaagctgcgtctgcttctaaaccgcgagaatatctgacactcacagcaatgttttgttgttggagaacattaacaaaagcttgtattctatcgcggtttggtcttttataatctacttccttgatagggttgtaaggaattaaattcacatgactttgaaaaccgcgcagacgttttgataattctaaagcgtgttctggtaagtcatttactcccgctaaaaggatatattcaaaagttactctgcgtccggttatttctacatattctcgacattctgcgagtaagtcttcgatggggtagggtttagcactgggaataatttgctctcttaatgtttggtttggtgcatgaagactgacagcgagggtaatttgaaaatggtgttcggctaattgacgaatgcgatcgcgaatacctacagtagaaacagtgagcgatcgcgctcctattcccacatcttgatttaaagatttcaaagccaaaattacattttctgtgttcaacaacggttcacccatccccataaacaccacattactcacccgttgctgaaaatcttcctgtacagttaaaacttgatccacaatttctgcacgactcagattacgtttaaaacctcctttccccgtcgcacaaaaatcacaggccattggacaaccaacttgagtagaaacacaaaccgttaaccgcttatcactgggaataccaacagtttcaataatttctccatctgctaatttcaacagatattttaccgtatcatcagcagcaacagaacgataatgtagagatgaacgacctataggaacatctataactttttctcgccaacttttaggaaatacagaaacatctgctaaattacgcacacctttatcatatatccaattatgtagttgtttcccccggtatccaggttgtccttgttcttgaacccaagcggttaactcagctaccgaagcaccgagaagaggggaaacaagttcagagtttgcagtggtagagtttgtagagttagtggaatttaccagagataccaggggtgtagcagacataaaaaaaaccataatttgatcctatatctctatcctacacccatgatctcaacttgtgttaggtttcttataccatttctgtatgaagatgcaataatcagatttttgtcaaattatacattgtaggggcaattcatgaattgcccctacgaaaatatagcgcaacctcacatagaatgggtattactctgaattaataggaatttcaataataaattctgtacctattcctggttcagacaagcactctattcttccactatgtttgtctacgataatttgataactaattgataaacctaaacctgtaccttcaccaacaggtttagttgtgaaaaaaggatcaaatatccgttgtttaatttctggattaattcccattgcattatctttaatggaaattttcacccaatcattattaatgatagctgtactaatgttaatttgactaaaatacaattcttttgccgcttttgataaactctgctcatgttgatataaagcatcaatcgcattactgataatattcataaacacctgatttagctgcgaagcgtaacagctaactaaaggtaacttaccataatctttaataactatattttgtccataacctaacttttccttaaaccggggttgcaacagcattaatgtactttcaatcccctcatggatatctacaaacttcatttctgattcatctaaacgggaaaaattacgtaatcctagaacaatattgcggatacgatctgcacctacagacattgaactgagtatttttggtaagtctacaatcaaaaaatctaaatctatttctgccatcttttgttgcaataaagatgtaggttggggatactcttgtttataaagattgagcaaatttatcaaagcttcaatatagctttgagcatgatcaatattaccatagataaaatttacaggattattaatttcatgggcaataccagcaactaattgtcctaaactagacattttttccgtttgaatgagttgcagttgtgtaaattgtaattcccgcagtgttttttctaagtgcagatttttttcatttaattcctgagttctattggcaactttttcttctaatttaccatagagttgggcattttctaaggaaatagctgcttgggaagataaaagttttaatactttcagtctttccggggtaaatgcacctactgttaaatcattttctaaatagataatgccgataactttaccttgatttaaaataggattgcagagaatagatttaggttgatatttaataatataaggatcaacagcaaatgttttttcattagtagcatcattaatcaagatgtctttttgagtattcaaaacataattgataacgcttaatggtaagttttgatgctcactgaattgtgtaaagtttaattcaactttttggttttctcgatattgtggtacaacaaataagttgccttcttgctgtaaaataaaaacagctttttttgctcctgtattttctacaattacatccagtaaagtatgtagtaatttttctatcttaatttccgaagaaatggctagagatgctttagtaactgtttctaaatctaaaattgctgatacactgctattgctagaatcagatataagcttactaatcaaattaggttcttcactgtctattgctttttgcttgagaataggaataagtagctgaggataggttgtttctaaatcttctactttagctttagcaccccaattaacataacaataataagcatctattaagtaagtttgagcaatttttattttaccagattccagataaaattgagcagctaattcattcgcaattgcttcttcttggatatatttattttcctttgctccagcaattgcttgatcatagagttccatcgcttgccaattattacccaaaactcttgctatttctgctgccactaaatcatacttatgctgatagttttgcggtgcatgattagcccaaaattgcatttgtttttgattggctaaaacagtttttaaacttgcttcttgttcgcttatagattgattttgatattcagacaacagagataaagagtagtataaattatggtaacttacagtaatttgtccaacaacatactttaaatattcctgtccttgaaccgcactttcaagggatttttcagtatttctaaaaaaataaaaaaatatactttttgctaaatacaaagaaaacaatgttgtagagctgttggtctctaataaaagtggtaataatacagattcattaaatgaattaccactaaaatccgatttcttaatattattgctatctaaaaaattcaacacaaactgtttccagacttggtgaacaggaacagttccctcttgcttgaaattacacattaaatgtatatatgtttcgagatgctgaaatatagatgctaaattttctccatttaatatcatatttatattgtacatagcggaagcataaccagcatattctaaatctcccacttctataccacaatttatagattccagtaaactatctattgttttctcaacatgatttttccaaaaattaatattagcattccacattaccaaaactctacatttgatttctttggcatccaatttatccaataaattcaaagccaatttaccatagcggtatccagtatcaatatctaagaaaaatccacataatattacaccataattcacatacccatgagcagaacttgaacaattaccatatttaaccgataaatgtatcattgtaaaaataattgctggaaataatgccggatcaacaaaataactagcagcagtcatgttagctaaaatccgcatcgctgcaattttatccggtgcagtcatcacaggtaaattgattaaatcatcaacatttaagttttctggtggttctttttctaagttaactcccaacaaattggtaatatttaaacctgtttcaatggctaattggatttgtacctgagccatatatatttgcatttctgcttcatatactttcacttgatcaagtaaactatgtgcatggtttttgactatttttatataggtttgtgcttgatcaaaattaatgtttaaaaattcggcttcgacagcttctacataaagatttaaagtcaaatcatactgattttgccaactatctattgctaacagttctaaacccattcttaaatatatcacagcggcttcataagctgtagacaacttagctttttgccctgcaattaagttgagtttagctaattcatatttatctaattcattagtaattaattcaacactaatattaagctggttgactatttcaaatattctttcttctagttccccagaatcagtattttttaaaattaatttcccgattttcaggtgtgttgcttgtttctcagcatcaggaatcaagaaataagcagcttgttgtactctgtcatggagaaacttatatttaactgtcagtctttccaaattatttaattttaattccgcagcagataaggaaataacatctatactatctgcattatttacataaaatttataacgttcatcttgtggtaaaatcaaaccttttctcaacgcattccataaatttgtagctatttctaattgtgatttttcacagacgatagataaagtatataaatcaaattgattacctatacaagctgcaattttcaagatgttttgtgtatcaactggtaattttttgatttgcgttcctaaaaactctacaatatcatcattttgatataaagccttagctgcataaatatcacactgccaataaccaagattaaaattaaaactaatcaacccatcctcatacatggatttcataaattgattagtaaaaaatgggtttccttgggttttgattaacagtaattcagtgagagattctgtttcagattctggacaatataaagtatctactattagttgatttaagtgtgatttatctaaaggctgtaggtttatttgattaactataacatctgctttgctaatattatctaaggtgattattaaaggatgtccagtatagacttcattatctcgatatgcaccaattaacaataaatattgagtatctgtttcactaattaataattctattaacttcaaagaagctgcatcagcccattgtaaatcatctaaaaaaattactaatggatgttcttttgtggcaaatatttgaataaatttaccaaagagaaaattaaagcgattttgagcagcactacctgtaagttctgggacatcaggttgcttaccaatcatattttctagttcgggaatgacatcaatgataacttgtccttgttctcccagtgcggatagaatatgatttttccattcttgtaacttgtcggtactttcggttaaaagttgctgtaataaactctgcaatgcttttactaaagccgacaaaggaatattgcgttgaaattgatcatatttgccagaaataaaataacctttttgacggataataggtttatgaatttcattaataaccgcagttttaccaataccagaaaaaccagctactaagattaattctttattgccattactgactctttcaaaagcatccaataaagtaataatctcattttctctaccataaattttatcagaaattataaatctgtcggctatatctctttgtcctaaatcaaaatgagaaattgcaccttgatttaataacatttgttgacagatttctaaatcatatctaattcccctggctgtttgatatctttcctctggtgtttttgccattaatttcagaatgatatctgctacaatctcaggaatttggggattaatttccctgggatgttcaggagttttcgccagatgacaatgcaccaactctaaaggattattactcataaaaggtaattgtcctgtgagtaattcataaaatgtcacacccaaagaataaaaatcagtccggtagtctatcccgcgattcattcttcccgtttgttctggtgacatatagggaagcgttccttctaatacatttaggtttttaatttcagcaacttctttaggtaaaagacaagaaatactaaaatctatgagtttaattttctttgtttgtggattaataataatatttttgggcttgatatctttatgaataattttattttgatatagatattctaacgcctcaacaatggaaatagaaatatggaaaaaccaatctaatgttaatggttgccacttagcatattgatgaagagatatgccgtcaatatcttctaaaatcagagcataactattaccataagtttctaaaacataggatttgataatattcggatgttctatttcttgggtaattgtgaactgattttttaaggatatcaattcgtgcaattggggatattgtgcgtttaaagttttgatgatgactggagtttgagtcttttcttgctcaccacgatatacagtcgttctagtgctaacatgaatgacttctgtgatgcgataaccaggaatagtgatagcagagatattactcttgctcataactcattattggataaatagggaatagttaggtttatttatctagacatcaactaaatgctttagacaacttttgtagagacgcttcatggaacatctctagattatttgtcaccagatgtctatttcatcggaaatttattagctgatagctgatagctgataggtgaaggcttaaaaaacattaaccaaaggttgtactattccaaccccacataaaacccttagcgtcagcaaattctatataaattctatttttaggaacacccaagcaaaagttaatttcctggcaaaattcctgactcatagctaaagtttgttcaggtttcattgtgccaacacttttaatttcaatatagcaaactggctctgtagttcccgcaaaagtcatgggtacttcaggttcaaaagctgtcatgacataagattcaggtttacctgtatgtttagctaacttcgctgataaacctttgagcatggactcaattttagctttttctggagcagatacagaagtttggactttgattaatggcataatcaacaattcaaaatttaaaattacaaaaaaaccaaataattgccggaataatcttaatgaattttcaaatcttcattaaaatttgagaattgccatcctgagaaggtagcaatgattctcctaattttactttgttttctgcattcagtgatgagatgaacgaaacaaatgattatgttgtggatggtataaacgagaacgacttgttactggtaagagggcaggactaatgatataaagtgtagtccgcagtaattgttcttgttgagtacattctgccattttgtcaagagaaacaacccggattttttcatcaggccacccgatacgaaagcaaatagcgacttgggtttgtggtgggtaatgttccaagagttgagcttgggcattggcaacatgacgcgcactcaggtataaacacaaactagcttgatgtgcagccaaactagccaattcctctctggctggtacttctgtgcgtccactgatgcgggtgaggataatactttgtaccaaattaggcactgttaactctatcttgagtttagcggccgcagcttgaaaagcactaataccagggataacttcaaaaggaatattcgcctccgccaaaagctgcatttgctcatggatagcactgtagagactaggatcaccagaatgaagacgcaccacagacttatgcgatcgcaccccttccaccatgatcggtaaaatctcttctaaagtcttattcgccgttttaataatctcggcatcttgccgacaaatatctaaaatctgttctggaattaaagaatcagcaaataaaattacatcagccctagagaggagtttttgagccttaactgttaataaatctggatctcctggtcctgctcccacaatatacaccgctgattctaagggaggaatcaaacttgcatcactcatatcattcgtacattcactcatagaaacctacacaactattcccaaaaaaatttttttggcatttcttgactacccttccggatcaacgctcctagcctagtagagagatatggtagatgcaccctggttaagccctagagaaaactctggggcattttttatttttgggcaggagtcagaagtcgtaggggcgaagcattcgggcgaacaattatcaattttatgaacaggctattttcctgtaagggcgaagcattcgggcaactaattatcaatttttatcacaggttattttcctgtaagggcgaagcattcgggcaactaattatcaatttttatcacaggttattttcctgtaagggcgaagcattcgggcaactaattatcaatttttatcacaggttattttccgaatgcttcgcccctacttcgcccgtacaggagtcaggagtcaggagtcagaagaattttagattttagattttagattggattcatgaaatacaatccaaaatccaaaatccaaaatccaaaatagaatcaccaatcaccagtcaccccatcacctttagaggaagaaacaacatcaggtaaagggcgtttgaataaataaagccaagctaaaccagctaaacctaaagaaatgcccgttaaactaactatttgtgcaattctcaaaggtcctagcatcaagctatctgtgcgtaagccttcaatccaaaatcgtcctaagctgtaagctacccagtaaacgagaaataatgtgcctacctttaggcgtggtttgccagataaagcgcgaaaaaataaagttagcagcagggcaaaaaccattaaattccacagagattcatatagaaaagtgggatggaaatattcaaaattagccaagttggggggacgatgatccaagggaatatacagcttccagggtaaatccgttggtctgccaaaagcttcagaattgaaaaaattaccccaacgtccaatcgcttgccctaaaatcagcgaaggcgctactaaatctgctaattgccaaaaagatatctttttgagtttggcaaagattaatgccgctatgacaccaccaataattgctccatgaatggcaatacctccctgccaaatggctataatcctctctggatgctgggaatattctgaccattgaaataaaacataatatagcctagctgcgggaatagccccaattaccagccaaatcgacaaatcactaattaactcaggattaacatgacgacgctttgccagatattgcgaaagactaacgccaattaacacggctgaggcaatcaacaagccataccagcgaataatcactggaccaagttcaaatataattggtcctggagaagtaaattgaaatcccaagagcaaagcaaaaaaatccagtgccatgcaaaattacctaaaaaagttgattgactactgctattttctcgacctcaacatcataagctggactggtgactggtgactggggactggggactggggactgggg

SEQ ID NO: 91 - DNA, 17251 bp, Sphaerospermopsis sp. LEGE 00249
  LEGE00249_109
gatattgagcatgattttagtgccttaaagagagccagaatgtatgctccttcaaatacacccttagatgaaatcatccgtgattattgtgtatcttaatgtctcattcttaagttaaatgactatagatttgagagcatgagcttctaattgtactgtttttgcatctccttgagtaatagcatcctgaatcgactgcaaacgctgaggcgtatcctccaaataacattgtattatttctataaattgttctgcgtcattattgcaaataatgtctttcagttcttttaaagccgaagcatcaagtatattattaggcatattttcaacaatttcaatattactcacaccttgtttttgacaattacgtaaagcgtttgttaaattatcaattctaattggttttgtagtgtagtcattcatccccgctgccaggcatttttcccgatctccttgcatagcattagcagtcatggcaataatccaaggacgagaagatattggccattcctgacaaatttgccgagttgctgtcaatccatccatttctggcatttgtaaatccattaataccacatcatagggctgtcttcgcaaagccgttaacacttctaaaccattggctaccacatcagcacgatatcccaaacgttgtaaaatatttacagcaactttctgattaactacattatcttcagctaccagaatttttaatggtctcttttcagccatctgagaatcaaacttcgatggtttcagatgttgaacattttctttattcttcacaacctgataactaaagatattaatgagaatattcacaagatgggattttttaatgggtttagtgagagatgcggctaactttaaatttaatttttgcaaattttcctgaatttggaacttacttattgatgttaacatcactagaggtaattgctggcaattaggcagttggtgaatttcatgtgccagagtacaaccatccatttctggcatttgcatatctaaaatcgcaatatcaacttgttgttgctgaagatatttgagagcttctttaccagattctgctagtacatatatcatacccacagactgacattgtaacatcaaggcttggcgattgatgatattatcgtcaactattagcactcgtttattagcaattaattcttggttttgataattgtctctataatctgcatcatttacaaatgtagtgacaatagtaaacgtaaaattagagcctttaccaactgtactttcaacccacatttctccgcccatgagttcagttagtcgcttactaattactaatcctaaacctgtaccaccataatgacgagttgtggaagcatcaacctgactaaatggtttaaaaagtttatacattttatcttcaggaatacctattcctgtgtctttgatactaaatttaatttcatgtaaaatttcctgtaactgacggtttggttgcaaattaatttgtgcatttgagggatttttcacctgactagtaacagaaagactaacttcaccagaattagtaaacttaattgcgttactcagtaagttgactaatacttgccttaaacgggtaacatctccggtaataaattcagatgtttgtgtatccatcagataagcaatttctaagcctttttcagtggctttaggtgctactaaatctagtgattcttcaatacaatttcttaggttaaaaacttgctcttcaatttctaagttcccagattctattttggaacaatcaagaatatcgttaattatagttagcatcgaatcaccactattgcggataatttcggcaaattctcgctgttgtggtgttagttgtgtgtctaataataatcctgtcatgccaattactgcattcattggggtgcgaatttcgtgactcatagtggcgagaaattcgctttttgtgcggttggcaatttccgcttcttctttagctaatttgagttgttcttctgctagttttttctcagtaatatctgtaattgtacctactaagcgataaggattaccctgttcatcacgaagacattttcctttggcagctatccaaatataattaccattgtgatgtttaatgcgatgggtattttgataaagttcggtttttccttctagatgatcatcaatatcaccaattactttatgtagttcatctggatgcacattatcagcccaggtagaataagtatgaggtaatgattctttatcatatcctaaaattctcatccatgcaggtgaaaaataaacttcgttggtgattaagttccaatcccaaataccatcgtttgtgccggaaatcgctagttcataacgttcttctcgttcacgcaaggttttttcaactttttttcttagcacaacttctgatgctagttcattattaatttgcgatagttcttgagtgcgtatttctacccgttcttcaagctgattattggaacttctaatttcttcaaacatctgcttcagtgccaaaaccatagattgaaaattccgactcagggagtctatttctgcgattgtgctattatgaaaaacaatttcttcttgtgctagaattttttcgggtaaatctgtggtaacttgagttaatcttaataaaggttgtactaatttcctactcaacataatagcagctatcaaagccattatcgccgtgactaacatgattgatagatttttgatgtaaatctcacgaatataattaattttgggttttgttggtatttcaataactaatttcaggggaaagtttttatctaaattaattctatggacataaacagatgtatcccacctcctaatcaatggtatatcagatgagtttgatagtaaatgaacaacattatcactgagctttgtgatttttttattttggtaaatatcaaaggttttgaggatattttccattcctgaactagtggcaattatctgattgttctcatctattagggtaacagtaaagtcttgactgagattgatcttttttattaattgacttagttgttccaatgggatctcaccaaaaactgcaccaataaatttattatatttaataattggtatacctaatgttagataatcatgttttttaaaatctgtagcaaaatctgatatatcattagtaactaaagctgaatttattttcattctttgaaaatcatctctatgggagatatttgggtatctctctgaatttgtggggtattctgtaatcacattacctaagttattaactacataaattttactgaattgaggaaatattgtttgagtatttcctataatttgcgaaatattactcttcttattttccaagtttaaaaatggaatttcaataatattgttactaatattttttaaaattcctaaatagttttcttcccataaatatatgttgttttttataacaaatgacaaagaatttaaatcttttgctacttctaattcaatatttttagcagaacggatagcactattgatattaatgaataaaactgggaagaatacaaatacaactaataaagtaaataggtattgttgccaagaaattgtatgtttataatctttattttctaaccatttttgcagtggtaaatagttgattagtaaactgcaaatcaaagcattaaaaaaaccattaacagcttgtttaacaaaaattaacaatgtacctataaaactaacttttaatgccccaccataaaatataaacactagaggcatacctaaaacaatccagtaaaggccatctagtaaaagtatattttggttttttctacgtaaaaataatcctacaaatagtgcttcacaagtaaaaattaccattgcatagggatgagtccatagtatgtaggtataactgctactgatgatagcggcaatagtaccccagaaatttccataaagagctacgatgagtaaaacagctatactaccaaatagaaagtccaccccaaaaaagagtgtgactttaaaataattacccagataaccagcaataattaacaatgacagcagcaaactttgttttcgcttgagtgatattcctgggaattttgatatttttttgaatatccgcatattagttaaatctgttgtgaagattttaaattcaggatttttcagatgtatagtagctttcagctatcagcttataaatcttgttggtgtcaggctttattattcgatcaccgtagatccgaaacgataccctttaccgtaaacggtgtgaattagtgcagattctccacctatctcaatcttacgacgtaacaggcgaattaaggcagcaatgacattactttctggttgttcgtcatcggtccacaaatgttgcataatttggctgtgtgtaagtaactgtcctgcattttccataaaatatttgagtagatggctttctttttgcgatagctcaattattctcccttgacgataggctatctgattttctacatccagttctaaatcagctactactaagcgtccgactgtggtactgtaagcatcaaaactagaacgacgtaacaaagcacggactcttgctagtaactcccgcagttcaaaaggtttaactaaataatcatctgcacctgcatctaaaccttgcacccgatcatctaaggtatctttagcggtgagaaatagtacaggggtagttttaccttgagtgcgtaattcttgacaaatttctaagcctgtttttcctggcaacatccaatctaaaattaataagtcataggttttagtttgtgccagttgtctgccgcttattccttcataagcagtatccagggtataaccttcacgagttaagacacgactcaagggatctgtgagttcgatttcatcatcaactaataaaattctcatgttgcttgtggtgagataataaaccgcaaagacaaagatatcaaaaaaaataatgctgactgtcgcactaccaaaaggggaattacttaaaaatagcatccgcttgctgcaatctgcgggattggactttagtggttttttagatgctggaaaccgccaactacaaattcctgatgctagtggacaagctaaaggtctgttagtacgagcgcaagatgtacctgtttatgtggaatatggtcaggcgcaattgggtattgtgggttatgatgtgctacgagagaaaaaaccgcaggttggacaattagttgatttgcaatttggttattgtcggatgtctgtggcggtaaaagcttctagttcttacaaatctcctttagacttacctgctcatggtcgagttgcttctaaatatgttaattgtgcgcgggagtattttcaaagtttagatttaccgattgaaatagttcctttgtatggttcggtggaactaggaccgattacgggtatgtctgaagctattgtcgatatagtttctacaggacgaactttgcgggaaaatggtttagtggaaattgcgactttgtatgaaagcacggcgaggttaattgttcatcctttgagctatcgtctgaatatgggtaatttacacaaagtggtggaacagctaagagttaataattgataattgataattgacaattgacaattgtttgattcaaggttgaaaatctccccctagaaagggggaaaaagcaaaaattccgctttttcaatcctcttcctttcagggaaaggtaattatcaattgctctgatgctaactgttcaatgattgaatttaggacagtatttgatgatgtcgaaatttatttaaatttatggctctaccgtacttgttaagctaatttaacaactggttcgagggaactcttaacagggaacagggaacgtagtgatccctgaacttcataaacttaatatcccctgaaatgtatatcttaggagtgattgacttaatctgttgcttgtgagaatcatcaatatgcggtcgtgatagcagtggcagtaattttgtgatggaaatcacagttttagccattagtcattggtcattagtcattagttatgatggttatagccattgagatgaggacatgattagtcctgaaaatctaagaataacaaaggtcttactcttgccttctgtcacctgtcacctgtcacctgtcacctcatcattacagcgatcacatactccctgaactgtaacctcgtaggtttttccttgcaaaccaggacggagattttttaactcaatacattgaaatgtatcccaagctatatcttcaatagcaccgcaagactgacagcaaaagtgatgatggggttgaacattagcatcataacgagataccccctcttgcaataatacttccctcaccagtcccacttctctgagtgcttgtagagaactatatatagtggcctgggatgaaacaggaaaatctttatttaaatcagtcagtatttgctcaacagttgggtgatctgtgcgagataacaaatttgcatagaccgcaaagcgctgaggtgtcacccgcaaacccttggattttaaggtttgaataattgcgtttgctttttcctgcataactattgccgtatttatagagatttaaccctaattatagtttagcacattaatgaattaatagtatatgttactttttataaaaattaagtacttataactattgaatttttattaaatcagaattattctgagatagagacaaaaagcaaacacaatttcacacatcaaaacatcaagaggtcaacatggctgtaattgaaaccgttcctaacgttgtctttaaaacccgtgttcgtgatgagtccattggtggacccaaccccttccgttggcaagatcgcaccactgaagaactgtttgctggtaagcgtgtagtagtattttcattacctggtgcgtttactcccacttgttccacctcccacctacctcgctacgaagcactatataacgaatttaaagctttgggagttgatgaaataatttgtatatctgtaaatgatgcctttgtgatgttccaatggggtaaacaacaaggtgcgaacaatgtcttcttgttacccgatggcaatggcgaatttacccggaaaatgggaatgttagtagataaagctaacttgggctttggaatgcggtcttggcgctactcaatggtagttaataactgcaaaattgaaaaaatgtttattgagcctggttttgatgataattgtcccaccgatccttttgaagtgtcagatgcagacaccatgttaaattacctcaaaagtgtgaaatagttgattggtaattggtgattggtaattggtgattggtaaaaataactaatgactaataactaatcactaatgattaatcaataaagtcccaaaagtcccaaatctaaaatctaaaatctaaaattgttatgacctacgaatttgacttatttgtaattggtgctggttctggtggtattgcaactgcaagaagggcggcggaatatggtgcgaaagtaggaattgccgagtttgatagactgggtggaacttgtgtaaaccgtggttgtgtgcctaaaaaactcatggtttatgcttctcattttcccgaattatttactgatgctgtaggctatggttggagtgctgttaaaagttctctagattgggaaaagatgattaccgcagttaataatgaggtagatcgtctgaatggaatttatcaaaaaatgttggataattcccaagttgagattttacaaggatatggaaaattaattgataaccatacaattgtagtaggtgaaagaacagttacagcagataaaatattaattgctgtgggtggaaagccaacaaaaccggatattcctggaattgaaaatgcgattacatctgatgagatctttcacctgaaaacacaaccaaaaaggatggtgattttaggtggtggttatattggttcagaatttgcttgtatcatgaatggactgggaacagaagttactcagatcactcgtgcggatatgattttgcgtgggtttgatgatgatttgcgaagtgaaattcaacaaggaatgacaaaccacagggtaaaaattctcaatcacactcaaataattggctttgaaaaagacgcagaaggaatcaaagtcaaagttcgcaaagatggcgagtctgaggatactgtggttgtggatgcggtgagtttagcggcgttaggaaggaaaccaaatactcagaacttgggtttagaaaataccaaaattcaactcaaaaatggagcaattgtagttgataaatatagccgtacagacgaagaaaatatctatgcagtgggggattgtacggataatattaacttaacacccgtagcaattaatgaaggtagagcttttgctgatacggtatttggtggcaaatctcgcaccatgagttatgaaaacgttcccacagcgatttttaccacaccagaagcggctacagtgggtttaactgaagcagaagcgcgagaaaaatatggtgatgcagtaaaaatttatcgctctcgtttccgtcctatgtattatactttagcgggtaaagaagaaaaaaccatgatgaaattagtggttgatcaaaatactgataaggtattaggggcgcacatggtcggtacaaatgcggcggaaattattcaaggagtggcgatcgccattaaaatgggtgcaaccaaagctaactttgatgctacagtcggtattcatccgagttcagcagaagagtttgttaccatgagataatgtcagttgtcagttatcgctgataactgataattgatagctgatagctgataattgataacatgagcatctatccaaataaaaagaaatctccagaaaaatcccgccaaaatcaaaatgactggcggttatttttgcgtttattaccctatgctcgccgtagcgtgggtttattagtagtatcaatgtttttgctcatacctcttggtattgctaactctgttcaaccgttattaattggacaagcaatatctttaattcgtcaagaacccagtgtttatgaatttatcaaaaatcgttctttatatgaaggtttaactatcattcaaggattattcttgataacaattattatcaagttattgcttacaggatatcagggttatttagtacagaaattaggacagaaaataacagcagaaattcgtaaagacttatttcatcatgtgacatcattagcagttaaatattttgatcgcacacctgtaggtaaactaattactagactaaccagcgatgttgaaagtttaggagatgtctttgctactggtgctgtgggaatttttgctgatttattttctatgttgctaattattggttttatgttttctatccaatggcaactagcgattctattactacttatattgctaccaatttcctgcttaattatttactttcaaaaacaatatcgtcaagccaactataaaactagagaagaactatcaaaactcaattcacaactacaagaaaatattgttggtgtaaatgtagtacagttatttcgccgagaaaaatttaacgcagaattatttagagagactaataaaaaatatgttgcagaagttgatactagcatttggtatgattctgctgtttcctctactttagaatgggttagtttaattgctattgctggtgtattgtgggtaggcagtttactaattttaagggataatctcagctttggtattttatctgcatttgttttatatgggcaaaaattattttttcctctgcaaaactttgctgagaaatttacaactattcaagctggttttactgctattgaaagagttattggtattttagatgaaccaatagaaatcaaagataaaagtaaccctcgcttatcaattttagataatcaatttggttatatagatgagataattagagatttagaagcacagaattttaacactgcaccagaattaggagaaattagatttgaaaacgtctggtttgcttacaaagatgatgattatgtcattaaaaatctagactttatcattcatccaggggaaaaaatagctttagtcggacctactggggcgggtaaaagttcaattatccggttgttatgtcggctttatgaacccacaaaaggacgtattttgattgatggtattgatattcgggaaataccacaagcagaactgcggcgttatatggcggtaattttgcaagaggcttttttgtttgctggtgatgtgaaaagtaatattactttaggggatagttacacctttgaagaaattgaacaagcagcacaaaaaacgaatgttgctgattttattcagcaattacctcaaggatatgatacccaattaagagaaagagggacaaatatttctagtggagaaaaacagcttttagcctttgcgcgggctgctattcgtaacccacaaattttagtattagatgaagctacagctaatttagatgtgggaacagaagcgttaattcaacaagcattaaatcaacttttaatcaaacgcacggcaattattattgctcaccgtttgtcaactattaggaatgtagaccgaatttttgtattgaagcggggagaattaattgaacaaggaagtcatgaacaattaatagcacaaagtggactttattcaactttgcataatttacaaatgttgggaacttagatggtaattgataattgataattgacaatttaagaagaaaagataaaaatttatctactgagaaaattgtcaattatccattgttaattgtccattgttgaaaccatttcaaattctaactgatgacttttgagaaaatcatgagtgaaatgatctaccacatttgtatcacttaattctaagttataaaagtctacaaaatcatgatcaaaatatggtcctgcgtgccaagttccaacttctaatttaataaaacaatttccaggaatccgaaaagccgcaagtttttctaatacaggtttgttaatgtcgtttttaggtggacaaactgccataaaccaattttttcctgctaaagaacctaaacattgagtacattgggtatgacgggtaattttatgaaactttgttcctttattgtgcaaacgcataatataaaaacgaggaataccgttttgtaaatttaattgtgcgtcttctgaatcaaaagatttcccatctttgctggcaaatattacttgtccatagggttgaaagttttctggtgtgatcaattctgctgttaattgttttaatgttgaagatgtagtcataaaaaatcctgcaacaatcctatttatcctatatcctatataaattatagtttattttatgtgagtgaagtacacaagggcgggcaggatgcccaccccacaagattgataatatattggtaaataatattaaccccacattccgcacttcaatttgtagcacacatacaagtatcataaaaagcatagatggttaaatataaatacgcaattaagaaagtaaaaatatagacgttaattcccctgggactactaaatagaaatccatcaggcattgataataaattgaggaaaaaaatgagagaataaaactgaattacataaaaataccttcataatatgaattaccaaaaagaagaaatggagagtaaaaacatagatcacttaggaataattgccggaataatagatgagataggaatagtagaaaaaatcaatgaaatattctcagtggatagtagagagaaagtaaacacaggagaagtagtcaaagcaattattctcaatggactaggctttgtatcaagaccactatatttatttccagagttctttaaagataaagccgtagaacatttaataggggcagggatacaagcagaagatttaaatgacgataaaataggcagagtaatggataaactctacaaatatggcttaactaaattatttctaatcattgccttagaagtagtaaaaaaatacggaataagcacaaaatattcccatttagactcaagctcattacatttacatggaaaatatgataattgcgtaaataatctagaaaaagaattaggaataaatcgagaacatccaattataatcacacaaggatattcgcgtgaccatcgccctgacctaaaacaatgtatattagatttaatagtaagtattgatgatattcagaaatttttaaacaaaatctatccctgggtattggtggaaaactatttttttcggaagcaactcaattttgttgaagggcgacactgatgctctagctttttatcaattatttttttctcttgtgagaaatccgggtttagctgtataatattgagaaaaggtgattagtgattggtgattggtgactggtgactggtgactggtgattgggtaaaaataactaataactaatatctaatgactaatatctaatgtctaatatctaatatctaatatctaaaatgacaccgattgaattattaattttagcatttgcaggaattatagctgggattttagcaggttttttgggaattggtggaggtacagttttagtacctttattaattagcttaggaaacgaatccatacaagcagtagctaccagtagtttatcaattgtcattaccgcatctgctggaagtattcagaattggcgcatgggttatctggatatcaacaatgttttaagtatggctttaccagccttaataaccgctcaaatcggtgttttcttagctaatttatttcctgaatatttgttattatttacctttggattgttattaatttccaatatttatttagttgatctgagaaaaaaaatagttgctagaaaaaaaatacaagaagaaggaaaccaagatcaggaatttgtagaagaaaataacgaaactaatactaatgttcataaaattcaagagttttggcatagaattatcacaggtggtactggcggtttattagcaggtttatttggagttggtggggggataattatggtccctttgcaaattgtcttactcaatgaaaatattaaaaaagctattcaaacgagtttaggagtcatagttattaccgctatttctgcaactgctggccatgcttattcaggtaatgttttgtggttaactggcgcaattttaggatttggtggtttattaggagtacaatttagtacccggtttttaccaaaattaccagataaagtagtgagtttagcttttagaagtttgttggctattttatctatttatatattttggaaagcttggcaaagttattaagtttgatgtaagcattaagccgttagctatcagctatcagcattcaacactaaaatacacacaatgatcacaaatgcacagagtgtcaacctaaaaagcttttagcactgtcacctgtcacttgttatacttaggggttgctgagaaagtctttccgtgagggcataggagtcaggagtcaggagtcaggagtcaggagtcaggagtcaggaggagatttgaaaatttctttgccatctcttgaaatccccaaaaatgcacactttttccggtatacccttcaaaacccttgcactaatttctgtgtttatcagcctctaacctttgatatatcaaggttttaggtttattcagcaaaccctacttaaaactaccaaaatttcaggaacagagaaaaatgttacccattgctactacactaattatcgaatatgaagaataattaagagaaaatagtgttagcaaaaatatgatgattttggctcaaagtttaacaattgattgggttttagtaaataaatgcgtcaagttcgctctttggggtgttttctccctcttacttgcggaaataattagagatagttatcatgctttgtgtcatcaagttacttggctggcaaaatggcataataaacatcatgcagcttaccgtcgagatttaacattagtttctcaacaagcttacttagattcccagttgtatcacgacatagttgagtcaattatactgctagttttattaatcacagttgctttagttttcagacaatggggtttatggttaggtgttgcttatggtggaacttttttatatggtgcatctttgcgatatttccaaggtacaatagacacagattacaatcatttaccaggaccgttagcagcaactccttctgtgtggtttgtgaatagaacatatcattggcgacatcattttgatgatgtaaatgcttattatagtggtgtattttctctggtggataaaatattaggaacaggactttctttaaaaggtaaaaccgttgctttaactggtgcttctggtgctttaggaaaagcattaaccgcagaattaatcaagcataaagccaaagttattgctttaacaactaacccagataaaatagaggaacaaactggtttaaaagtgatgttttgggaattgggaaatgaagaagaattaaaagccaacttgcaaaaagttgatattttaattatcaatcatggagtgaatgtttatggcgatcgcacatccacagcaattcacaattcctatcaagttaacactttttccgctttgcggttaatagatatattttctgcaactgtcaccggacctgatgctaaagcgactaaagaaatttgggttaatacatcagaagcagaagtttcaccagctttaagtcctttatatgaaatcagcaaaagggcgttaggtgatatcattaccctcaaacgtttagatggagtttgtgtaattagaaaattgattttaggaccattcaaaagtcaacttaatccattcggtgtgatgtcagcaaatcaagttgctaagggaattttgtttttagctaaacgggattttagaaatattattgtcactgtcaatccactaacttatttactattccctatcaaagaatttagtacatggttgtactatcgtgtttttagtcagaagtaatcagtagggtttgctgaaaaagtcttttcgtggagacagggaacagggaacagttttttcttgttcccagtctctgactgggaatgcaattatagagtctccgaatctaaattttactacaaaagggacagtctttaatcattcattcccatcaaaatatttcaatacaagatcccctaattcttttttcattttggttataaaagatgaattagtttaataagtcgagtatctgagttttattaattccgattcaattacaattcttatagttgaaatttgctaagtaaccaagcacaaacttcagattgactgctttcacgactacgacgtaaagctgtttctaaaactgcaatttttaacccaggtaaaacctgtgattcttgaatgcgttgactaccttggttaatcatactataggctatcacttgggcgttttgtacatctattacccaatattcactaacacctaattcttcgtaaagactgcgctttgttcctaagtcatctaataaagatgttttagcaatttcaatgactaaatctggtgctgggtagtgatctaaattaacaattcctgtacctgtggggatagtttgggcgcgttcttggagataataagctacatcaggttgacagtcttgaataccttgtttacgaaaagttgtggtatctaaacctgtagctaaaattcctttaatagtggcaaataaagtgacagcaaaaataattattacatgatcttttccatgatcaaaactaactggtggcatttctagcctcatgtatcctttataatagtaactttttcccggtttattaagtaagttggtggttatttgttcatactcattccaagaagtataaacccatgtatctgtaggtatttgagtttgtaaattactcattttctcagtctcctgagtacataaatatttgtaatatccctaactttttagatgtattaatcatttctaggacttacgcaagatgtgactgaaagccttattcttgcgtaggggtaattcatgaattacccctactttcgttcccttttgcgtaagtcctgatttctagaaacgatgaaaatagaagtcggggatctgaataaaatgttgggtttccttgcgtcaacccaaccgatcgcttgacattcaagacagtcgctactaattagaatttacctgcaaatactctttctgctggtcctgtcatatatattttattttctacttcggaccattcaatttctaactctcctcctggtagttctattatggctgtgcgatcgcatttatcatttaatactcctgcaaccaaagacgcacaagcaccagtaccacaagctaaggtaattcccgcgcctctttcccatacccgcatttttaaataattacggttgacaatttcaataaattctgtgtttgttctttgggggaaaacggaatgatgttcaaatttaggaccaatgctttctaagggaatagctgctacatcatttacaaaggttatacagtgagggtttcccatactcacacaggtaacattccaagtatgatccgcaacttctaaaggtacattaattactttactgtccgtaggtgcaagggtggtgggaatttcctgtgctaataagcggggtttacccatgtctactttaacttgaccatcatctgtaagttgaggtgtaattgtaccagctaaagtatgaatggtgtagaagtctttggtgcgggatacaccttccaactcagtcaggaaaaccgctaaacagcgaataccattaccgcacatttccggttctgaaccatcagagttaaaaattctcatggtgtaatcagtgccattttgcccaggaagtgcgaaaataacaccatcagcaccgataccaaaatggcgatcgcataatttgacagctttttctggtgtaatgaccggtgttaacgaggaacgattatcaatcaaaatgaaatcattacctaaaccatgatacttagtaaattctattgccatttttccctagatgaattatcacagataagttactactaatttaaacatttaaaattggtaacgggtaatgggtaattggtaattggtaattggtaattggtaattggtaattgggaagaatgaatattaattacccagtcaccagtcaccagtccccagtcaccagtccccagtccccagtcaccagtcaccagtcacctgttccctctcttgttgccatttttccagcaaat

SEQ ID NO: 92 - DNA, 17077 bp, Sphaerospermopsis sp. LEGE 00249
  LEGE00249_110
gccatcgagggcggcggtgtggaagcaggccccatcgctgtcggtgaggtcggcagccgtgagcgtcaatgcggccagggcattgaacggatcctccggcgcggccggcttcgcataggtcaggcggtcgccgctgatcgtcacccgccccgccccatcgaatggcgtgaccccgttgtccgtcacgacgccgacgccgccgttggtcgtgcgtgacagggtcgcgagggtcgagctcgccgtgctggcgtagctgcggttggccagcgcgccaccgaaccgccagaaggcgttcgacgtgccgccgatggccacgtcgtagttgcgggtgttgcccccttgggcgttcagccctcccacggtgatcgcgggatccgtgccgaatccgaactcctgcccgacgtagccgaaactccccgccgcgcaagcattcgcgaacgcgggcatattcgacgtcaccgagaggcgggccgggatgaatcggcccacgttcgccaaggccgtgccaacgacattggccacgttgccgggcgcgggctgcgatggtgtcccgtagccgaggtaatcctcgtcctcgaggtccggcgtgatcgtgatgatgccgacttcgtcccagcgccacgaccccgtcgcgacgccattggtgaaggcaccgaagccactggccgcgaccagggccggattgttgccacccgccggggcctgcagcgtcggcgtcagccgcacgcgctccggcacggtctcccggccgaagttgggcgtcgtcgcaccgctgttgttgcgtgccgtcacggtcgccgaaaacggcacgccggcgcgcgcgaacaacgcgcccgaggccgaactcgccccgcccggccccgaaccggttacggaaagcaggaaatcacgcggcttggcgacgaagtcgtcctggccgttcagcaccagacccgcatccccgttcgcggcactgccggtgtagcgcgagaacagacgcaccgagccggcatccggataacgcaccgtgatgttcgcctcgccgttcgcattgaaggcgagattgaagctggtgcccgccgccgcgacgccgatgttcgtgccgttgaccgccacccgttgcgtaccggtcgtcggattgaggtagttcgaccagaagcccaccgtccgcgtgacgttggcgaagctcggcacgcaggcccgagtggtgttgctgagctgcacggcgcgcacagtcacgttctgcaccacgtcggagacatggttagacacctcatggacgaatccggcatcgacgaatggcaggttgcaattcgcctgctgcacgccgccgacgaagcagcgatccggtgtgaacggccgccgcggcggattgcttgcggtgatcgtcaacgccgcattgcccgccgtcgagcgccgcagtcgcagcgtctggccggaagtgatggtctgcgtgtcgccaccgacccaacccgaagggctcaaggtcacctggatcggcccgctcacctgctgcgtgcagttggtgtcgagacaggcctgcacgacgatgctctcgggctcgcaggtcagcccttgcccgtcgtggaagaagcggaaatggtcgatttcggcgagctgctcgattcgcgtcgcgcagacctgcaggttgtcgagttcgtggatgttggtcgagccgccggtcgatcccgtcaacgacagccggaagttctccggcaccgccgcctgcgcgggattcgcggtgaagatgttgaacggcgcgacgagcgtggtgaagccgctgccggtattgcgctgcacgctcacctgcgcgccggggaccaccccctcgcgattgtcgaccgtgctgcgatagcgatggttcggtccagcggcggcgcccgacacatcgacgcccggcgtcagggttgcggtgcccgccaggtaggggaagcccgtgattccgttgcccgagccacggagcgcgacggagtccacgcggaacccggggccacccacacgactctcggtcgcgttggagaagttgccgaactcgtcgatgccgatgcccagccatccgccggcaaatccgttgatgccactacgctgggcatagcccagtgaaccaccgaatccgcccgccaccggcgtcacgttgccgtcggagagcgtcaccgcgacgccgtcggcgccgctgccgccgtaggcgaggtagtcgaactccaccaccacgcggttgtccgcgccggggaagaaccggcgcagcgaagctgccgtcgccacgttgccggacgcatcggtgatccgcagccggttgttgacgatgcgcggctggccgaagctgccgctgacggaattggtcgcccagtcggtggcattcagcgccgcggcgttgaaggtgtcggcgaagcaggtgggcgccaacgcccggagctccacgaagtcaacggcgaacgcttcgcccgtggccgtcgcgccattcacgacgaaccgaacggacgtcgtggccgacaggaaggcgctgatcgtgtagctgcggtcgaggattcccggcaggtcgtcgctgaacgtctgcagggtcgtccatgggccaccggaggcgctagcgatctgcaccgccagttggtcgctcgactccaggtcgccgaggctgcggatccgcagcgacagcgtcgcgacgtcgtagccgttgaaatcggcactgcgcgtgatcgtctggttgttgcggagttcggcctccgcgccgttgcggaccggggcgccgctcaaggtccaagccgccgagaaactccgcgtcccggagttctcgccccagctcgcggtgttgaagtcgtcgcggacggtgtcctgcgcccaggcctgcggggcgccagtgatgagtgccaacgcccacatggcgcggaggacgacaccgcgaagggtcatcggcgccaccgaacggggatcgccacggggcatctcaatagacttcgcgctcgtggatggcgcgtcggtcgccttggtacacgccgaagccgatccgtgccgtcgggggcgcgttgcccgtaccacgccagttgaactgcagccacgcgggcacgttgggcgtggcgtcgagcacgcccacgttgccgaccccgggcgcacgcatccaccacaggaaggtgccgccgttacccactgcgggcaccgcggtgaagcggcgcgccacaggcccgggcgcggcgcagccctgcccgctcgcgccagggctgccgctgtcgtgcacgcaggtttccgccggcacgagggcatcaccggcattcacgtcgaccagcggcgcgagggtcacacccgagcacacgtcgtcggtgttggcgacgaaggtcgtgccgttgaagaactcggcgcgcatcggcacctgcagatcgagcacctcggggccgaacgcgttggtcacggcgatgcgcccccagcgctggacgctgccaccgatgccggcgatcgtcagtgggtcgcaaccgtcgagggcggccgtgtcgaagcaggcgccatcgctgtcggtgaggtcggcggcagtgaggttgagggtgacgagggcactgaagggatcctcgggcaccactggcttcgcatacgtgaggcgatcgccgctgatggtgacccggccggtgccatcgaacgccggggcggtattggccgtcacggcggccgcaccaccgttggtggtgcgggacaacgttgccagtgttcccgtggccgtactgctgtagctgcggttcgcgagcgctccgccgaagcgccagaacgcattggctgcgcccgtgccgttcttgtagttgcccgtcacagcgcccgtcgccgcgtagccggtcacgagcagctccggcagcgttccgaaaccgaactcctgaccaacgtagccaaagctgccagccgcgcaggcgttcgccagcgttggcgcgttgggaacatcgacgccgagccgcgccgggcggaaccgaccgacgcgcggcacgtcgacacccaccacatcgccggtgaccaacggcgagccgttgtcgacgaagttgaggtagggcgcgctgtcgagccgcgggcgcagcgtgatcacgcccacctcgtcccagcgcaccgtgccgctcgaactgccgccagcccaggccgtgaagccggacgccttcaccggcgtcggattgttgccgcccgcgggcgccatcagcaccgagtcgaatcgcacgccttcgccgaccgcctcgcgcccgaagttcggcgtcgccgcgcccgaagcgttctgcgcttcgacggtcacggtgaagggcacaccggcgacaccgaacagcgggcgtgtcgcgtcgcccggcagggcggcgttcgcatcgtggccggggatgccgagcacgaagcgcgccggccgcgccacgaaggtgtcgtcacccgtcacgatcagtcccgcatcgcccgacgatgagcttcccgcatagcgcgcctgcagacggatctggccggcatcggcgtaacggaggctcgcggtcgcggtgcccgcgccatcgaaagcgagcgggatcgacgtgccgggcgaggcggtgacgaggttgctgcccgccaagaccaccggccgcgttcccgtggccggattgctgtagttcgaccagaaacccacgctgcgggtcacgttcgcgaagagcggcgtgcacgccgcattcggcggtgcgcgacgcacggcctggatgcggacggtctgcacggtgtcggagacatggtccggggcatcgacgatgaagcctgcgtcggccacgctgatgtcgcaggcgcctgcgctgtcgatcgtgccggccaggttccggcaggtcgtcacgagggccggcgctggcgacaccgtgcctatgttcagacgaacgttctccggatccggcaggccggtcgtcgtcggcaacaggatcgacaccgaggtgctggtctggcccaccgggatgctgaagggcaccgaattgccgcccgccaccagcgtgccggtggccccagcactggagagcgagctgcagtccgcgttcgcgcaagcccggatggtgatgctctccgccgcgcaggaatgcgcgctgctgtcgtgctcgatgcgatagcgcgacaccgcgctggcgcaattgcgcccgatagtgcggtcgttgtttacttcgaccgcggtgagttcgtagttgtagagcttcacttcgtcgatcgttccgcggaacgcgcggtcaccgagcaagccacagcccgcacccgtcgacacgtcgccgccgatgtagaagttgcagccgttggccgtcagcgttccggcccacgtgttggtgttcccgtcgagcacaccattgatgtagatgcgctgccgcgccgacccggccacggatcggaaggtgatggccacgtgggtccacgtgttcaatgggatctgggtgttcgacgtcagtgaacgcgcaccgccaccccaccaccagaacagccgacgattcgcatccagatggaattcgtagttctggtcgttcgacagtaccgagaacaacccggcgcccgtcggcgcctgcgtcggatagatccacgccgaggcggagaactcggtcgagtagtcgaactgcgcgttcgccggcacctggagcaccgagcgtccgtcgaactgcgccgcattgcagaactgcccggagaccgccgccacctggccatggatggtcgggttgggcgcgacgaggttcgtcgtgctgggcgcggcgatcacgctacgcaagccatgcaagccggtgccgccgctgtcgaacacttcgccggcgttgccggccagcgagcccacggcgccatcgagacggtaatgggtgttggccggcgccaatgcaggccgcaatgcgaccagcgccgttcgcccggccgcagcggcgatcccggcgtccgccgctgtcgccgtccgggtgccggtggccccgggggcactgcgtggctcgagggtcatcgtcaggctgacacccgtggcacttggacgcaccgcctccgacgtcacgtcgatggcttcgatcatgccggccggcgggaaccagtcttcggtcgatcccggcatcgcgaaggcgcccaccagcacgccgccgcgggctgtcgtggtgacggagggcgtggcgtgtgcgtagcccacggccgtggcctgccgaccggagacatccaccggcgcggcgttatcgacgccgatgaaggccacgatgccgcccgtggcgccctggtgggccccgccgaacgtgaagctgtagttcgcgaccacaccgtccgccgccggcaccacccgcgtaaagacagccagccgcgcgctggcgctggcgttgtcactgaacagtagggtccaaccggccggcgtggcgatcgtttgcgaagccggcaccacggtgatcgcggctacgagcacatcccccgtgttggtgcccgcgggcttcggcagcacgagcgttccgctggccacgccgccctgcgacgtcgagcgcgtggcgatttgcgcggccaggggagccgcgaaggcgaagcagagcgccagcaccggcaccagccatcgccacgccctgcccggccatccgctcattccgtcaccgtggcgcgcacgcgccgggaaatgaaggtgttcgacgcgaagctgccgcgctgcgcgacggcggtcagcgtatagaccgagtacgtgtccggggcttcatccaccgtcgtcgagttgcagcccagcgtcacggtgaagccctcgatgtcgatgctcgccgggaccgcgccacagccgccgcccaggctccgggcgatggcaatatccacgccgctttgcgcggcgaacagcgcgcggctggcgtcgagcgcctgcacggtgctgcggttgcgcgcactcagcgtcagcaccgccgccagcacgatcagcagcgcgatcgcgatcacgaagaccgcggcgaccaggctgaagccccgttggcggcgagctgctctcatgggaggttcggcaagtggacggatttgaggaggttcaccgattcgccatcgcgcgtgatggcgagcgacagcgcggcgaggccctgtcggctcgcattgcccgcctcgaagcggaagctgcagaggctcacgccctcagccagcagcgacgagctgccaacgggcggcaccgtcatggtggtcgcaggggcataaccggcatggcgacgcagttgcccatcgctggcgcagcggtactgcaccgcttggtcgaccacgtagacgcgctgcgagggggatgggaaggggaactggaaaggcgccgcgaggttgatctgcgtggtcgtgctgccactgccgatcgttgcgcggttgtccccggcccaggcattcgcctgcgtgccgctggccgtcaggttgtagacgacggcccactgccccggggctggtgcggccggtaaggccgacaacagttcaaacgacgcgtcggcgctggcgaaatcaagcacattgccgccgcccgccgcggtcggacgcccgcgatagcggcccgccatcggggcgaccagcatttcgatcgcccgcccgtcggcgctggtgcggatgctgttcggcaaggcgagccgcaggtcgcggctgatgcgcgccatggcctggtcggccgcatcggccaatcgcgcacggcgctgcacgtcggcgctggcatcgatgggttggcggatcagcgccaccgacaccgtcgccagcacaccgatcagaacgatcacgacgaccagttcgatcaggctgaatccggcggcgaggcgggtccgcatgtcagtactgtgccttcaaagccgcgaggcgaacgtcgaaatcgccatcgatgttcgtgacgcgcacttccacccgccgggtcgtggcgccgcccaccgtcacggcgtttccgacgttcatcgtcacccggtaacgcgaaagccccgcaatggccacgccggcggaatcggtcggcgatgcctcggtggccaagcaggcgtaatccccgatgtcatcccacagatcgcggctggcgccgcagccctcgttgacgccgtccgggtccgcatacgccttcagcatcgcttcctcgaggtagccctcggcgatgtagagcgcctgcgtctgcagcaccggtgacgcgctgccgccgccgagcgtgccgacgaggccggcgatcgcggcgaaagcgacaccgaggatgacgagggtcaccaccagttcgagcagggtgaaaccgcgttggcgatcagcgcacatggccggtgtccgcctccacgatgatgctgcgcccgccgacgatcgccgttccgccgttcgggctcggcagtccctgcgcgttgaatgtgatgacgaggccttgcgtcacggtgatgcccgcggtcgccgtgccactgaaggcgccggagccgccggggttcggcacgtcgagcgagaagccacccgcggtgccgcagctcgtgtccgtcccgtcgctgcgccgacgcaccgcataactgctggtcgcgctgctgacttccacctggatctcgcaacccgtcgcgacggccaaccgctgcccgtagcgaaaggcggtcgccacctgctccgcgaacgccgcgctgcggaagctgccttcgccgaggcgaggcaacaccaccacggcgagggcgccgaggatcacgatgacgatcaccagctccaccagcgtgaagccggcttggcttgggcggggggggaaggtgcggttcatgcggtcaggcttcggccctgaacgacaaagggcggcaggttaccctgccgcccccgtgctcggacgcgttcagccgggggcggaacgcgatcaggtgcccgcgcgaaccgcggtgaacgtgcgggtcggcgtggtggtgccggtacgacgcaaggtgcaggtcgtcagggtgctgccgttgttcgccgcgattgccgtgtcggcgaccacttcgaaattgccgaggccgccgttgacgaccagcgaggcatcaccacagctgtccaccggctcgcagtccgcgtccgctgcattgtggttgttcaccgcgcagccggcgtagttgatgttcatcgccgaggtgatcgccgcggcggaggcgctgagcgccgcttcctgggcatcgtcctcgaggttgacgaagcgcggcaccgcgatggccgcgagcacgccgaggagcacgatgacgatgacgagttcaatcagggtgaagccgctctggttcttcatggggtgctccaggctcagcagccagtgatgtcacgcgtgatcgtaggcgaaatgcccgccgcgctgggagaaacgtacgtcacagaacaggtggtgatgccatcgaggcggatggacaccgtggaaccccccgcagcggcgccgccggtgaagttgtagcggagggagagattgtcgaacagcagcgagaggtcggcctgttcggcctgcgggtaaccgaaattggtgccgatggcgccgccggggccggtgccatcgatgtccacggaatcggtcgcgttgtcggattcaccgatggccgccgacttggtgtagatgatgttcgaacccgagcggatcgagttgaacagggaatcgatgacggcaatccgtgcctcgcgctgcagcgaaatgaagcggggcacggccagcgcggccaggatgcccagcacgacgatgacgatgacgagttcgatgagggtaaagccggactggcgacgcatggacggaaacctgtcgttggtggagggatacgacgcagcttagacgcttcgtcatgaagggactatacgcccttgatttgcttggaagaatgcggggtgccgtgaattgctgtaaacgatttcaacccgcctgctccgttcagggggatgccccggaaggaccgatgcgaaccagaagcaaatcgcgggccaatcccggcgtcgaacttccggcgtcgtcacggtagacctccacgcgccagcgccggtcgccgccctccagccaggtgacgcgatacaccagttcgccccgcgtgccgtcaaaactccagcggtcgtcagcccactcaggcagcggccctcccggccgctccgcgagcggtatcgccgcgagccggtcctgggcccaaccacggggatcgctgccggcacggcgctccaggccagccatgccctcctcggcgaccacccgcttgccctcgagccagacgaggttctccaggttctgctcggcgaggtcgagggccatgcgctcgccttcggcaaggatgtcgcgaccggcccggaacagcagggtcagcagcaccacgacgatcagcaggctcacggcgcggttcacgtgacgcagccagcccgcgttggtcgtggcgagggccggccattccgcgcgcttcacgccatccgcctcactgccgggccagcttcacgaggtcccacatcggcagcaacacgccgagggcaaggacgaagacgatgccagcgacgaccacggtgaggatcggctgcaggagatcgtttaggttgcgcacgtcgtagtcgacctcgcgctcgtagaaatcggccacttcgaccagcatctcgtcgatctggccggtctcctcgccgacggtgagcatctgcaggacgaggggcgtgaagcactgctgcatcgctgccgcgcgcgtcaggctttcgccacgctcgatcgcggtacgcatgccgagcagctgcttggcgatgacgtcgttctccacggccagcgaaaccacggccaaggcctgcagcaccggcacgccggaacgcgtggccatcgcgaacgcgcgtgcgaagcgggccagcgtggcacgcagcacgatgttgccgatgatcggcatcttgaggagcaacccgtgccaacggagccgcccctcgtcggtctggacgtagcggcgcagccaccaggacgcgcccgccatgccgccgagcaccagccaccaccaggcggcgaagaagttcgaggtgccgatgatgatgcgcgtcggcagcggcagctcgacgttgaaggaaccgtacaacttggcgaattccgggatcacgaaggccatgatcacgaacaccgcgagcgccacgaacaccagcacgatcaccgggtagcggacggcggtcttcacctgttccaccaccttctgctcgcgctcgaggtgctggttcaggcgcaggaacgcctcgtcgatgcggccgctctcctcgcccacgcggacgattgccgtcagcagtggcccgaagatcttcgggtgacgggacatcgccgtcgccatgtcgcgaccggcctcgagctcctcgagcatcgacagcagcgtcttccccaacgtggcgttgcgcgaggtcgtggacagtcggcgcagcgcctgcgtgatcggcacgccggcgcgggccagcgcgtacatctgccgggtgaacaggatcaggtcgacccggctcggaagattgaagccgagcgacgccatgaactggtcgccgagcggctcctgcttgccggtttcgacgatctccagcggcaccatgccactgcttcccagctggcgggcgacggcttcgctggacaggccctccatcgagccgctgaccgccttgccctgggcatcgcgcgccttgtactggaagctaggcatgcgtcagtgcgccccgtccggcgcgatctcgccgccgacgcgcttcgcttcctcgatcgtggacaggccatcgagcgcgtaatccaacgccgcatcggcgaggggacggtacaggggcgccttcatggcggcttcaacgaaatcctgctgacgcccaaggcgcagggcgttgagcatttcgagcgtcggctcgaggtactcgtagacgccgatgcgcccgcggtagcccgtgccattgcagtgctggcagccacgcccgcggcgcagccggtcggtcgatgcccccggacggatcgcagcgagccatgcgaggtcgttcgcgtcggccaagtgcctttcgccgcaactttcgcagacacggcggatcaggcgctgggcgatgatcacgcgcagcgaggcggcgagcaggtaacccggcgcccccatgtcgagcaggcggtcggccgtgccgacggcgtcgttggtgtgcagagtcgacagcacgaggtggccggtcatggcggcgcgcaagccgatctcggctgtctcctggtcgcgcatttcgccgacgaggatgatgtccgggtcctggcgcagggccgagcgcagcacggcagcgaagtcaaggccgatcttggtgttgacctgcacctggctgatgcgcggcagccggtactccaccgggtcctcgaccgtgatgaccttcttctcgggccggttcagcgagttgagtgcggcgtacagcgaggtggtcttgccggagcccgtcgggccggtgaccaggatgatgccgctgggcgaatgcagcacgttgcggaagcgcgccagcatcggcgcgggcatgccaaggtgctcgaggtcgagcatcgcgccgctctggtcgagcagtcgcatcaccaccgactcgccgtgctgcacgggcatcgtcgagacgcgcacgtcgatccccttgccgcgcacgctgatctggaagcggctgtcctgcggcatgcgcttctcggagatgttcaagcccgccatcagcttcaggcggagcaccagcgccgaggcgatctgccgctcgcggatgatctgctcgttgagcacgccgtcgacgcgctggcgcaggcgcaggcagtcggtgtcgggttcgatgtggatgtccgaggcgcccgcctgcacggcgtcgacgaacagggattgcagcagcttgaccaccggcgcgtcggccgtgtcctcgccgagacccagctgcgagacgtcgagcgcggcatcgttgctgacttcctcggagagctcctgcgccagcgagctgatctcctcggtgcgccggtagacggtatcgaaggtgcgcagcacgtcgtcctcgcgcaccagcgcgaggcggatctccttgccgcccagcacgcgcgccagctcgtcgtaggcgaacaggtcggtggggtccgccatgccgacgacgtacccgccgccctcttccttcaacacgatgctgcggaagcggcgcgcgagcgtctccggcagcttgcgcaccagcgccggctcgaagcggtagctgcgcaggtcgatcagcggaatggcgagctgccgcgacagcagctgcagcatgtcgttctcgctgaccatgccgaggtcgatcagcgtgcggccgagcttcgagccgagcttccgctgctcggaaagcgcgtgctgcagctgttcggccgtgatgaggccgttctcgaccagcaggtcgccgatgcggattttcttcacggcggcactgggtagcgtggacatggtcacctcgatggttcgccggcggagagggcgtcgacccgctcgccaagatagtctgccaaagccggatcgagcgggccgcggcgctgggcctcgcggaacgccgccagcgcttcgtcgccacgacctgccgcgtccagggaaatgcccagaccggcccaccaagccccgatgtccggctcgccccgaagggcacgtcgataggcctgctcggcctcggcgtggcgcccaagctgctgcagcgcagccgcctcgagagcgtcgcgctcggcacccgcctccggctgtgcggccaacgcgaccagagccgcttcggcgcggccttcagccagcgcgcttcgcgcggcatcgagcggatcaaccgccgtcgcgacgcgctcgatcgtggcgcgagcggcaggtgctggtgccggcggcggcacgggctcgggttgcgggtccgctgcgaccgccgttggacgttctggcgcagcaccaggcggtgccggcgctgggaccggggctggcaccgggacgacgtttgccgcctgcggcgccgacggagcgacagccacggcttccggtgaaaccacggcctcgatctccgcgacaggcgcggccaacgccggggccggggcgtcgctgcgggttccggcctcggcaacgcgctcgatggcctgccaccggttcgccaccagcagcaccgcggtgatcgcgagcccgccggtcacagccgccacccaccaccagagacgtcgcgagcggcctgacgacacctgatggcccacgggttggcccgccgaagccatcgcggcacggcgcgatgcggcatcgccctgcccgcgcgcatcgaggtcgcgcagcatctggttgatcacgctcatgccgcgcccccggcgaaacgccaggccacggcggctccggtgatcgcagcggcaaaggcggccaaccacgccgcggccttgccccaaccagcgcgcacgggcgccgtagcgccatcggtatcgcgcacggccagcgccacttcagcttccgaaacctcgcgcaggccgcggccatacgcgaggagcaaggacttgtgcgcgagcacgttcaccaatcgtggaatccccccgctggcgcggtgcaggcgtcgcagcgcacgctgtgcgaacagcggacggccgttgtaacccgccaccgagagccggtgctgcaggtagagcgccacgccctcggcgtcgagcggctgcaagcggtatccgaagccgatgcgctgccgcagctgccgcagttggggctgagcgagacgttcgtcgagttccggctggccgaacaggacgacgtgcagcagcttgcgggtctcggtctcgaggttcgacagcagcctcagcgcctcgaggctctcatccgacagggcctgcgcctcgtcgatgatgacggccacgcgcttgccgctggcggcgagttcgatcagccgctcctgcagcttcttgaccagcgtgtgctgccgcggcgtcgggccgagcgccacgcggagctcgtcggcgatggcgcggcgcagcgcgtccgggtcgaggtaggggttgggcacccaggccgtcacccactgctcgtcgaggctgttcagcagcaggcggcagaggagcgtcttgccggtcccgacttcgccggtgaccttgatgaagccctcgccaacgtcgagcgcgacccgaagcacctgcaaggcttcgacatgcgcgtcgttgcgaaagaagaagccggtatccggcgtcagcgagaacggcgcctggcggaggccgaagtggtcttcgtacatcgccgtggccaggccaccggtcaaggggtttccgactgcagcgcgcgcgtctcgtcgaggcgcggctgcgcggcgcggtcccaggtctcgcggccttcgaccacggtcgggcgaagcaggatcaccaactccgtctttcggccggtattgcgcgtctggcggaacaggttgcccagcaccgggatcgcgccgaggaacggcgtgcgcgcgttctgcctcgtctcgctgtcctgcatcaggccgccgatgacgatgagctgcccattgctggcgcgcacgatggaatcactctggcggacggcgctcacggccagcggcaggcggtagtcacggtcgccgacgacgatgagcttggtctggtcctgtacttccgagatggtcggctggacatgcagcagcacttcgccgtcctcggagatctgcggcgtgacgtcgagcgagatgccggagaagaacggggtcagttccaacgacgggtcggtctgctgggtctggttgccgacgctctggttctgcgcgccgctgatgccggtgacgaagaactcgtcgctgccgaccttgatgacggccttctggttgttggtggccgagacccgcgggctcgacatcacgcggacgtcgccctgctgcttgagcagttcgacgaaggcgctgaagtcgccgcgctgccagccaatgctgaacacaccgccgaaggccgacgtggcggtgccgtcgggcaacgaggggttgttgggattgaggctgccggtgttgccgccgatctccgagcggccatcggggccgaagatggcaccgccgccggtctggccgatgatgccggcgctgctgtcgacgacctgggcccagttgatgccggcctggaacttgtcgttgagcgtcacttcgatgatccgcgcctcgaggatcacctggcgcgtcaccgcgccctgcacggcatcgaggtagcgctccacgtcacgcatctcggaaggcagcgcgcggatgacgaccgtgctcgactgcgggctgacgatgaccgaccggcccgggccatcgccaacgatggccaccagggcgcggtccagctcagcccagtagtcggattcgctgcgcgtgcggacgcggctggtgaacgcctcgctgcgaccactgctgccgccacccgactcgccgtcttcgccgccaccgttgcccgacgacgcgttcgtcgcctggccgttgctgttctcgctgctcgtgaggtcgccggcgttgacgcgcgtgcgcgattcaccgacgcgctgcaggtgcaggtagtcgacctcgaacacgcgcgactgcagccgggccggcagcacgatgtagccgttgccgcgcggctcgtactcgtagccgtagacctcgcggacgacctcgagcacctcaggcaccgtgacgctcttcaggctcaggctgatgttccccgccacgtccgggtgcaccaccatgttgatggcggtgtcctgcaccaagctcatgaagaaggcgcgggccggcacttcatcgacgtcgacattgaagcgcggcgccgcggctgggcgcggtggcggcgcgacgagggcgcgagtcacggcaggcggcggcgtcgcggcctgcgcgggcgtggcgggcgacggcgtctgggcgcccagcggcgcaaccaggagcagggccagcgggatcggcaggagtcggaacatcagcggttcaccggtcgggtggaattcggaaaggacaggcgcagctcggtgctgcccgtggggctgcgcaggcgcacccagccggggccgatggcctccaggcgggcgtcgccgacggcatcgccgaggcggtagcgctgcccattgatgatggcgctgcgctggctcggcgacaccagcgtggattgcaggacgaggactgcaacgggggcggcggcgtcagcaacgacgcgaggggcaatggccggccgcgtcgggtccggaacgccggcaccgaccagcccaccgagggcagcgacgaccagcaggaggcgaaggcgctcagacaccgatccagccctcctgcaggcccagggtttcgaccgtcagcgtgatccgcagagctggccagcgctcggcatcga

SEQ ID NO: 93 - DNA, 17036 bp, Sphaerospermopsis sp. LEGE 00249
  LEGE00249_111
caggggaagccgggcaagctaataacccagtcaccagtcaccagtccccagtccccagtcaccagtccccagtcaccagtcaccagtccccagtccccagtccccagtcactaatatggcttgagaatagtaactgcgtaattttgcggtgaaagataattttgtgctaatttttgcagttcttgagtatcaaaggactgaatttgctgtgggtaggtaacggctagttcagcttgggctattgtattatagtaaccataaagagatgttaactgatttggtgtttccgttgcaaaagcataatcattacagagtgatatttgcgtgcgcttcagttcttgctcgctaatacctgttgtttgcaaatggtgtaaatgctcctgaattaaattctctactctatccagatattctggttctaaccaagcggtaattgtcaataaacttgactcttgttgtacggaaaaattactgcaaattgcttgtaccagttgtttgtcttctcgtaagtcatgcactaaccgggaagttcttccttgtgctaataatactgatagcaaatctaaaccatttgcatctttgagttgttctactcctggtgctacccaagccattattaaccgcgcttgctctaggcgtggtaatattaattcctgtttttgaatgcctgtaattattggtggtgctattttctcagatacaggaaaatttgcgtcatcactaaattctgtaaatgttctattgacaatttcccaagctctttcctgttccactccccctacaactactactgtcatgttttctggttggtagtgggaacgatgaaaacaccgcatcgcttctggtgaatggtgcattaaatcatgctcagtacctaatatagaacgtccataagggtggttttgatagacgtttttcagcagtgcttcaaatcctatggcatcaggatcatctgcacaagcacgaatttcttctaatactacatctcgttcccgaataaattcatctgcggaaattgctgcatttagcaatagttcgcctaagtggggtaaggtgtctgctaggtaaggggtagctgtagctaggtagtaatgtgcataatcatggctcgttgctgcattacttacaccacccattttttcaatgttataatcaaattcccctggtgctaaggtggctgtacctttaaatatcatgtgttccaaaaagtgcgccatgccaaaccacggttctggttctaagtttgctcccgcacgcacccaaacatctgccactactacaggggtagcgggtatctcctgatgaataaatgtcaaaccgttgtctaggcgcaaaaccgaggctggaaacactgtgttaggtattttgttgggtatgtagtttgtcaattttttgtaggttcaatcaccatttgacctattttgaccatcttaactcaaaattttatttgtttttgtatcaaggtatacagattttttgcgatcagctaagttgcagacgttgattaagctgttgtgcatttaatttgtataagtgcaacagtcatcttgcctgttaaacaagagttcagaatattaggattatacaatttagctgtgtaacagcttagtgattggtgattggtgattggtgattggtgattggtgattggtgattggtgattggtgattgggaacgggagttattaattttgacttttgacttttgacttttgacttttgacttttgacttgatacctccccatttcccccgacgttctttaatttaaatcgcggtttttcatgcgttcaagactacctgtagggatagcagcaattaatttttgtgtatattcttcttgtggttgacgataaatactttctgctgtacctgattcaactattttaccttgattcatgactaaaatgcgatcgctcataaatttgaccacacttaaatcatgggaaataaaaatataagtcaattgaaattcttgttgcagttcttttaataagttcaaaacttgcgcttgtacggaaacatccaaagcagaaactgactcatcgcaaataataaacttgggatttaaagctaaagaccgagcaatacaaatgcgttgacgttgaccaccagaaaattgatgggggtagcgtttcatatcatcagcacttaatcccactctttctaaaagttctactgctcttgcttttctctgttgtttgctttctcccacagaatgaattaataaaggttccataatcgcttccccaattttcattcttgggtcaagagaactaaagggattttgaaacactatttgcattttacgtcttaatttctgtagcctttctccttggagataagtgatattttgcccatcaaaaataattttaccagccattggttgaatcaatcttaataaggttctacctaaagtagttttaccacaacccgattctcctaccaatcccaaagtttctcctggataaactgcaaaggaaacgccatttaccgctaaatgataacgttttgtgcctccaaaaactccccgaatcggaaacccaactttcagattatcaatttgtaaaagtggtttttgggtgatgagattttctaatcttgtgttaatttcttctttagtaacttctggtggttgtgctggctcttgggcttgaattataacttgaccgttggcattttcttcaacaatcatgtaatcagaaacagtcaacaatttttgaggacgacggttaagagtcggacgacaagcgactaaacctttagtatatggatgttgaggataagtaaatatttgtgaggctgaaccatattcaacaattttacctttatacattaccgcaacttgatcagcaatttcggaaactaagcctaaatcatgactaataaaaatcatccccatgtcgcggctttgttgtaattctcgcatcaaatcaataattgttgcttgtacagttacatctaaagctgtagtcggttcatcagcaattaacagtgatggattacaagaaattgccattgcaatcattaccctttgtaactgacctccagaaagttcatgagggaaacgttctaacattgctgctttatgttccttcactaattgcgctaactgaaaatcactgggtagaggtgtttttgggtgagttaaatgccaattatcgagatattgctgttgtattttctcatcactaggtaaaagtttaacttcttgtaaacctgcgatcgcaattcttttggcttcagttatactaactttctgatgtcgcataattgcttctgttagctgaaaaccaatgttataaaccgggttcaaagaactcataggttcttggaaaatcatcgccatatctccaccccggtaaagctgcatttcttcagcagataaagctaataaatccagaggtttagcattttcttggggacgaaacaaaatctctcccccactcaccttaccgggatattgcaacaaacccataattgccagtgctgtcaccgatttaccacttccagactctcccactattcctagagtctcaccacgacgtaaatgaaagctgatatcatccacagctttaacctgactaccatcaccggaaaattcaacttgtagattgcgaacctctagaaaagtctctctcataagtctgggttagtaattaatgagggaatagggaaaagggaacagagtataaaaaactattttatatcaagtccgttaaaatagtgatcatatctgtgaggtttggtaatgggtaatgggtaatgggtaatgggtaatgggtaatgggtaatgggtaatgggtaatattattcccaatcaccaatcaccaatcaccaatcaccaatcaccaatcaccaatcaccaatcacctataacttaggtaaaatttcaggaatcaaattaccaggaactttagataaagccaaattttgaccttggatacctaactcattatgaaaagtgcgaattattttgactatatggttgaaagttgtgtgataaccttctgtgttttttaccaatctacccaaagcttgtacatgatgttctaaggatgcttctaaatgctgagaaataatttttttatcacccttgaaagatggatctgtaactaattgataatgggctaaagccaagttattctgtgttgccaaaacatcaaaactgaaattcatttgatttagagaattagccagtgtgagagtttcttcataagtcttgatgcacaattgtaggaaattttggcgaatgtccttagttacttgtggtaaatttgctatatgccaataagcagtagccagattattcttggtagcagcacaagcagcaggaatattatttggtgtccgatatttcaaagcttcccggtaaaaatcaactgctaattgtaaattttccaatggtgtttcatattgagataaattccaataagcagtaccgatattattttgaatcataccatatttaattggttcatcttcaggttgatagtgagcaagtgcgaaattataagctgcgatcgcttttttgagatgttccacaggatcactatattgtcctaaatgccagtatgcagtccccaagttattttggcaagcagcatattttaaaggatcaatttcttcggtgcggtagcgcagtgcttcattgtaagctttaactgcttcctgccaattttccaccgggttagaaaaccttgttaaatcaccataagctgtggctaaattattttgtacacgggcataaatttccggttgactatcaggtgtaatcagtttgatggctaactgataaaattctattccctgctggatataagtttttgcttcttcactacttcctggtgtgcggtgcaacatccaatatagtgttcccaaatcatttaaagtatctggaagttggggtgaagtatcatcatagctaacagcttcctgataggcaataatagctaccatcaagttttctaaacttgactgtccctgttcaatacgtaaccgatacaacgttcctaatttgtgataagctactgcgagttcttccccagaagcttgctgaatttttaatttttcaatttcccaaagtagttgttttggttgtaagttttcctctgcatcttcagcaatattcagatttagtgattctttgaatagcgacatcaattcatcactaatatgcaagaaagatgaaagctcaggtataatatcttccttggtagatgttgtcgatgatggctgtgattcatattctagacttacagaagtatcttcaaaaaaatcatcatcttcagtaaaattaaattcttcaatagccttgttaatctcctcttgtgaggtgattgatttatcaacaactgatttttctagattgcctaaatcaacacttcgcaaactagagaaattttctggataactgcgattttctaacgttggtgttggttctccagtaaatataaatacaccagttcgacattgccaaaatttcggtgctgattgctgaatagcatacaaccaaggacgaggaacccaaaacaataaactagattctaaaaatgaactggtttcttggttagcaaaatactgttcacttaatcgaagatagtgcagaaacaaacgctgtaccgctactgattgtttcgtcagcagttccacacctacaatctgaaatgctggtattggtaaaggacgaccaggactgtcttttgattccccaaccacaggaggaggataattagctaaccattgatttatctgcgctatgggattgggatcatttaaattaagtcgcaatgtgactaatcgtggataagctggagtgctaattccctctgtctctactgggtgatataacacttgccccactggataagccaaggtagaatgcaaccgagtagctacttgatttctcaagtgtaagtcatcacatacggcaaaaaatatttgtcgtcgcaaacctatactcagagcaaattttaggcgttgatatacttgccgattcaaggtaaaaatatctgtagttaaagtttcattcacgctcatagtggctacaacagcctagatacaatatacataactgattgaaaaatctccttaattctgatttcaggtaaatgtattttgttcaggatgaatcaagttttccaggtttaatcacaataaacgtatatatttatactttaattctctttgatcttagcaaaaaataaaaaaaatcaggttcatcctgagatggaaacctgaaaatctgaaaatattaaattttattaaattattttgcttttgtttttagttgacattggacacggtaaaggcgacaaaaattaaactacctaccaaaagagcagcagcaattcctaaaataatataattgcgcttttgtccatccgtaggtggttctgcttgataaaccttgggttcttgggcaaaattattgagaagaccgccttcttcgttggtatagggcatgaagtttttccttgttatcttcttttatttaatgtgcattcattatatagcaactagatttgatttgtaataactgtaaaataggaaatagagatatacccaacttatgaaaaaagctgaagatatagatattaagctttttaaagttcagttacttctccagagccaaaagttgatacaaagttttacaaattgctataaaaattaacacaactatccctaaatctggataattgatcagcagctattgtgactcacattcccgtttcgtaataaaatgccgataacgaaacatcgcttctaactgcaattgaattaaccaaccactgacaaattccactccatcaccaccaggcatagaataagaaatattatcagttaatttagtctttccatcttctgctgtaaactcatgacgatgcacccaagactcaaaaggtcccgatatttgtacatcagtaaacaaccgatattgttcaaaatctgtatgacgcgctaaccaagttaaaggtaaaagtccaataaataatttaaactcagttattgcaccctcatcaagtcccccttctcgacgcaatacctgtacaggttgccaaggtggggtaagtagctgtaaaatatcttgtctttcatggaatttccaaactacttcgacaggtgcgttaataatagaagaatgagtaaagtacagcatgaaacgaaaaaccttcactttaacctttaattagggtttgctgaataaacctaaaaccttgatatatcaaaggttagaggctgataaacacagaaattagtgcaagggttttgaagggtataccggaaaaagtgtgcattttttgggatttcaagagatggcaaagaaattttcaaatctcctcctgactcctgactcctgactcctgactcctatgccctcacggaaagactttctcagcaaaccctaattaaccttcatattcggtgtctatttcaatatccagtgtatcttcatcaattctgatatacaaaatattgggacgacaacaaacttgacaatcttctacataattttgctgcattcctgcactaatatcaataaaagttgtgttttcttcaccacaataagcacaataaaattctgatgtattttgcatttttttcaatgtgtcattttcagtctttatttaactggggaagcagaacgaaaatgactcgttgcttcatgtaaatgttttattagtgtagactgtggtaaaggtccttgcaagtgattccaaggtaaaattttctctgttgaccaatgactataaacgtaaaaatctaaatcgggaattttcccttttaactctttaaaagcacgtttataacttcccaaagaatcaccaaaaccacgagttaattctaacagatgggaaagtctgcgatcgcctctcgataacaaagtttgtataattgaccaattataactttcgggacgaaaatctataccttggggttttagctgtttttgtaaaaattgtaaccgcttttcagattgtttatttaccccaaaccactgaaaaggagtgtgtgacttaggtacaaaagtgctacaccctagagttacccgcaaaccaaaagcagcttttttaacagctttcatcattgctaccgtagcatctaaatcttccgattcttcccccggaatacccaccatcccatataattttaaactagataaacccccagctttcgcattgacagcagcttggataatttcctcattatctaattttttattaataatttgacgtaaattttccgaaccactttctacagcaatagtcaaagaacgagtatcacgttttgctaaagttgcagctaacttttctgtaaccgtattcgttctcaccgaagcaacactcaaccgcacatcatcatattttggttgactaatataatctaataactcagaaaattcaggatgttgtgtcactgaagcacccaataaacccagacggttagtaacttttaaaccttgttcaatagcaggaattaaagatttttctaaactcgcagttctaaagggtaaagttaaataactcgctaaacaaaatcggcacatttcaggacaactccgcaccacttccaccataaaaatattttcccaagctgctttttcagtaacaacagtagaagcagaaagagtatttcctcgataagtttgcttttgaataactgcgggaatatgactatcaagaggatgaatagatttgatttctccatcatcactagcatattcaacatcatataaactaggaatataaattcccggaacttgcgctaacctgtttaatttaactttccgtgttgcgtttctaacttcttgataagcatcaataaaactacttaataaaatttccccatcacccaacaaaaccacatcaaaaaaatcggcaaaaggttcagggttagcagtcaaaaccggaccaccaccaaaaacgagaggatgattttcggttctattgcttgcacgcagaggaatatttaaagattccaaaagattaaaaatattcacataatctaattcccaagacatagaaaaacccaaaatttctggatgtctaggaagttgttcttgaatatcagtaaataaacgactcacctgtaaatcatcacgcatcgctaaagttgcccaaaccacctgataaccaagactggttatacccacagtgtactcatttgggaaagcgaaaattaaaggaatagcgtcatttttagggcttgctggggtaaataaaagcttttccgagtcaaatacagatgatgtcacaggtctttataaaaagtaatctatatataattataaaccaaattagcaaaaaatagtagattcagccgcaatctgcaaaattaatatttcatctgcgtttatctgcgttcatcggcgttaaatctgcctgaaattacatcttcaaattacatcttcaaattacatcttcaacgagtgcaagggtttatcaaaactaaacccttacagaacaaatactatctatatttaattttcaaccagagaataataaaattgaaaaataaagttatcccattagccataataatcggtaaagcacccagaatcatcccataaaccaaccacaaaaacaacccagtcataaaagtaatcagcatcacaaaagaaacatccttagctgattttgttttccaggtttggaacatttgcggtaaaaacgcaatagtggttaatgtccctgctgctaatcccaatgtgttaataaaatccattttcttgaatggtgaaaattaagatattatcatataatatagcagtttacggacggtcaggatgcccatcccacaagggacaagataggataatttattttttctgcttctgttttttcagatattctttagcccaagcaaccctgccaactcatctgccaataattcacaaattatagtcttgatcatgggtggataatcttagaggatgtttgataatttgtattatttatttaaagcaaataatgattgtgaatattagacatctccagaacagaaattatggaacctatttatgggggcaggtcgaagcttatgggatatctagatgtctgatttttccgttaaattatcgccctgtaagggcgaagcattcggaaaatatcctttggtgaataccgatcattaatcgctcgaatgcttcgctcagtccctcaagagggattcgcttctgatcaagttatactgtaagggcgaagcattcggaaaatatcctttggtgaataccgatcattaatcgctcgaatgcttcgcccctacttcgccgctacaacttatgacaaattaatacattctattttggagaggtctattggcatagccaattagagtataacgagtaatcaatagtaaaaacaaaactctataaggtctaaaaacctcatagagtagcatttataaaaaagtgggcagtaccagactcgaactgatgacatcctgcttgtaaggcaggcgctctaccaactgagctaaccgcccgtgttttcctgacttaattaatatagcacaggctttttaaattttgcaaggggttgggaaaaaattttttttggggaataggacttaggcaagattcaactcaaaacctgattcttgcgtgggggtaattcatgaattacccctactgatcttctccagagactatcaatgaagatcagaagtcagggatctgggtatagggatctgggtatactgaagtttgacttttgacttttgacttttaaaatatgccttctggacaaacacacgatcgcattactatttggtctgtacctgtggtagcaggtatcactttaatttctactcgcagcagtagtgtgacgttattagttgctggtgggtttatgtttggtggtttgatgtttggtcctgacttggatatttattctcgtcagtttcaacgctgggggtttttgcgttggatatggctaccttatcaaaaaagtctgcgtcatcggtcttttttatcccacggtccaattattggtactactttgcgggtggtgtatctaaccacatttttagcagttgtagcgattttggttttggtaattttcgctaaattgggtaatgtggctttgaattggggggaagtttggaaaagtgtgggaaagactatatcaatatattatagagaattttttgctttgtttttggggtgtgaacttggtgctatgagtcattctctgagtgattggactggttcagcttataaaaggtttcaaaaacaaggtgtacagggattgctacccagtggcaaaataaagaagcgtaaagttaatagtcgcggtaaacgtagttctcaacccagaactaacaaaagccgcactaagtcttaacgaaaacaggaggcaggagtcaggagggtttaagctgattactaatagctgaatacttacccgcagaatacacaaaaagcacaaaattctaacttattatggcagaaaatcacaatcaaactttagcagcgttacaagaattaattgatatagtggcaaaattgcgatcgcctgatggtggatgtccttgggacttagcacaaacgccggaaagcctgacaccgtatatcattgaagaagcttatgaggtagtagacgcaattcaaacaggagataaaaaggcgatcgccgaagaattaggagatttattattacaagtagttttacaagcacaaatagccagtgaacatggtgattttacattaaaagaaattgccgaaggtatttctcaaaaattaattcgtcgtcatcctcatgtatttagtgatgtcacagtagaaaatgtagaagaagtgcgtcaaaattgggaaactatcaaagctgcggaaaaaggagaaatcttagaaaagcaaaaattgagtgataaattaaatcgttatcgtcgcagtcttcccccattaaatgcagcaatgaagatatctaaaaaagctgctgctgtagggtttgagtggaacaatatcgaggaagtttgggataaatttcacgaagaattaggggaatttcaacaggcgttagctgaggaaaccccggaaagacaggaatcagaattaggtgatttattatttgccataattcaattagccagatggcataaacttgatccgagtgtagggttacaaggtacaagtttacgatttattcaaagattgcaaaaaatggaagatgtcatagatcgtcctttaacagattatagtttagcagaattggatgcactctggcaacaggcaaaagctaaacttgcgaaagagtagggaataaaagtaggggcaaaccccccgtggttgcccctaaacaaaattaattaaacattttgaaaaaacctaaaaaaatcaattacgtaggggcaaaccccccgtggttgcaccaaacatcgggggtaggcacgggggcgctacccctactcatcatttcctattatttactagtaattagtttttttatatttcctattccctatggcttattccttattgcctattatctatccaacatcaagaaatcatagactctctaactaaaagcctataataaaacctataataaaaatatatctgatattgatacaactttcaaagaaaatagaaatgaatcaagagtttgactaaatttcccttaaaaaaagctaacaacaaacataaaaacaaacactataaccccgattttaattgagtacatcagatgacttctaagcgatctatcaaaaaatctcaagctaaagaatctaactctacagaatacccaaaagaggaagataaacaaaacaatttattcccaattgtcggtattggagcttctgcggggggattagaagcatttacacaattattgagtcatttacccacagatacgggtatgggatttgtgctagttcagcatttgaacccccaacaaaaaagtatgttgacagaaattctgtcccgcacaactcaaatacctgtaactgaagtacaagagggaatgactgtagaaccgaatcatatttatgtgattccccctggtgtgacaatgaccattaatcaaggagtgttaaaacttcaaccccgtgaaaaaacatatcaacaacccatgacagtggatagtttctttttttccttagcagaagatttaaaaaacaaagccattggagttatcttgtcagggggtgatggagatggaacaagggggttagaaagaatcaaggcagaaggtggtattacttttgctcagtgtgaggaatcagcaaaagttagcagtatgccgaatacggcggtagcttcaggttatgtagactttatccttactcctcaacaaattgctgagaaactggccaaccttagcactcatccctatatcaagcactcaacagcagtgacacagactgaagttatcccagaagaaaaagatggactgttaaagattttccagattttaaggacagcgacaggtgttgacttttcctattacaagcagaataccctaaagcgccggattcagcgccggatgatgttatatagactagataatttagaagattacctgcattatcttcaggataaaccggcagaaattacagccttatattacgatgttttaattactgttacctgttttttccgagatgcagaagcttttgaagctttaaaaactacaatatttccaattattattaataagcgcaaaccagatgatcctattaggatttgggttgctggatgttcaactggcgaagaagcatattctattgctatttgcttaatggaatttttaacaaacaagggaattaatatccctattcaaatttttgcgaccgatattaatgaagtagccatagaaaaagccagagccggcatttataaacctaaccaggtagggaatatttccccagaaagattacaacgtttttttgtacaggtagaaggtggctatcaaattaataaagcagtgagagaactgtgtgtttttgctagacaaaacttaattaatgatccgccattttcccgactggatttaataacttgtcggaatgtgctgatttatttgggtgctgatgtacagaaaaaagtcgtgccaatttttcattatggtctgaaacctacaggttttttgatgttaggaacttcggaaacagtgggcgaatttacggatttgtttactgtggtagataaaaagtacaagatttatgctcgcaaaattgcagctacccgattagctattgatttaatggctcgtaactatccagtagaaaccgctaaattacaaatgatagaaaatgaaggtattggaaatgatgtggaaatccaaaaagaagcagatagaattgtgttaaatcaattctcacccgtgggtgtaattatcaacgatgattttgatattttgcaatttcgaggacagacgagtccctatttacaaccagcaccgggtaaacccagttttaatttaataaaaatggccagggaagaattgcggctagatttacgtagcagtattcatcaggctaaaaaacaaaaaatgccagttacacaggaagggatacaaattaaggcagaaaatcaacttaggctggtgaaaattaatgttgttccctttcaatgtgctggaacagaagaagaattctttttgattttatttgaggatacacccactccagttagtgctggatcgccaataggtagtaatattcaatctgaaccgcagcaagcaaacagttatgagcatgaactttctattctgcaacaagaattaaaatctactaaagattatttgcaatcaattattgaggaacaacaagccagtaatcaagatttgcgagcagctaatgaagaaattctctctagtaatgaagagttgcaaagtaccaatgaagaattagaaacagctaaggaagaaattcaagctactaatgaagaattgaatactattaatgatgaactgcaacggcgcaatgttgaatcaaatcaggtgagtaatgatttacaaaatctgctcagtagtattcagattgccattctcatgttaggtggtgatttacagattcgtcgttttactcctgtagccggagcaatatttaacttaattccttcagatgtgggaagaccattaagtgatattaaacataggttagatatttctgacttagaagcacaaattttagaggtaattagtaccctgaatttgaaaagtttggaagtgcaggatcaagatggtcattggtatgatttacgcattagaccttatcggacaatagataataaaattgatggtgctgtagtaattttggtggatattgatgccatcaaacggactgcggaaaagttgagagcatcccgtgattatgcagaagcaatagtagatacagtgcgccaatctttagtggtgctggatatgaatttacgggtagttagtggcaatcaatttttctatgacacattccaggtagtacgagaagaaacagaaaatcgcctgatttatgaaattggtaatggccagtggaatattccccaattgcgatcgctcttagaacatattctccctggacaaacccattttgaaaatgtggaagttaagcataattttgagcaaattggccacaaaattatgcgcctcaatgctcgaaaaatgccgcaaatagataatactcctttaattctcctggcaattgaagatattactcaacagaaacatttagaagcagaacggattcaactcttagaacaagaacagtccgccagaacagcagcagaagcagctaaccgagctaaggatgattttttatctattctctcccatgagttacgaaatccccttaattctctgttggggtggacgcagttactacgaaaacatcagcttgatgaaagtaaaacagatcaggcattagaagttattgaacgggctgcccacgctcaaaacctgctaattggcgatttattagatatttctcgcattagttccggtagactgcatctcaataatcagcctgttcaacttgtacctgtcatttccgcagctatagaagttgtacgtttgtccgcagaagagaaaaacattcaaattcaatcgcaactagatcctacacccagaaccttgatcggagatccgacgcgcttacagcaggtaatctggaatttactttctaattccattaaatttacccctaatagtggaatcattgatattactctcaattacactaatgatcaagcggaaattcaagttaaagatactggtttaggtatcagtgctgattttctcccttatgtgtttgaccgatttcgtcaagctgatagcactacacgcaaatcaaatgctggcttaggactgggactagcaatagtgcgccatttggtagaactccacggtggtactgtagaagcagcgagtccaggtaaggatcaaggtgctacttttaccgtcaagctacctctgcaaactaaccaggaagagagtgatatagcagttactccagaaccaaccccccccgctgcacctgctgaccttgtttcctacccatctttagcgggtgtgcgggtgctgatagttgatgatgaaccagacctgcgtcaattatttaaaatcgtgctggaagattacgatgttcaagtaacagaggctacatctgcacaagaggcattatcaatactcaagactaatcccggtgggtatgatgtcatcctctctgatattggtttaccagaagaagatggttatgcactgatgcgtcaaattagggctttgagtgccgaacagggagggaaaattcctgctgctgcactgactggttatacgggagaagcagaacaggcagagtctttagccgcaggttttgaattgcatattaataaacccattgaaccggatcaattggtaaatgtggttgctgttttggcgaaaaggtcggtaaataggtgattggtgactggggactggtgactggggactggtgactggggactggtgactggtgactggggactggtgactggggactggtgactggggactggggactggtgactggtgattggtgattggtgattggtgattggggacagaga

SEQ ID NO: 94 - DNA, 16893 bp, Sphaerospermopsis sp. LEGE 00249
  LEGE00249_112
ttcccatacagagtatgggaatgaattttgactggggactggggactggtgattggggactggggaagaggtgattttctcgttttctcgttcccatactctgtatgggaatgaattttatcaggctctgcctgatatgaaagtagacaaagtagaggcagagcctctatgatggcattcccagtctgagactgggaacgagagaaaaagaggtaagggtttagcattgctaaacccctacacataactacaaataactacaattaacgattattaaagttatgaaaaaaaatttgtggagaatattaagtttactgttgattttgcttttagcttggttgtggataatgattaatcctaaaccggcgatcgcccaaattaataccattaactataacaacgcttctttagaaaatcgtgacttttctcacacggatttatcaggagtcaatttcgtagctgcggaaatgcgtggggcaaattttcaaggggcaaatttaactaatgccatgttaactaaaggtgtcttattaaaggcaaatttacaagatgctaatttaaccggtgctttagttgatcgtgtcaccctagatggtgctaatctcaagaacgctatttttacagcagccactttaacccgtagccgcttttatgatgcggatatcactggtgctgattttacagacgctttgattgaccgttatcaggtttcattattgtgtgaacgggctgatggtgttaaccctgtaactggtgtttctacacgagatagtttggggtgtcgataggtgacaagtgacaggtgacagtgaagaggagggtgtagggaggggtgtaagaaaaagtagagtctccttacatttattgtttgagactagggacgagacaaactgttattaattccgaaaaatctaattatcacaatatgttaaaatccaaataacaataattagagaaatcactatgaacaatttaacattagaaacattattcaaagaaatagataatttaaccgaagaggaaaaaattgaattagtcaattacttaaacaaacaaattcaaaaacaaccaggtaaaaatacagcaaaaaatttagttgaattatttcaaacttctcctttagtgggtgtagatttagatttggaacgtcaaaaagattttgatcatcgtaatttcgagaccttagcagcagcttttcaagaacttcaacaaatctgtatagaagaaaattatgatttagaaattccctctcgccaaaatcgcccaactccctttgattaatactaaaaatgacatttttgtgtgatactaatattattagcaaaacctaacccaaaaattcaaaattggttcgataattttctcaaaaataattgtcaaatattacctattactgatgaaatagctaaactctgtggtgaaataagaggacaacaaagattaagtaaaactgtcacccaagcagatatgatgattggtgctactgctaaaatacaccaacttactttagttacgcgcaatatccgtgattttgatagttgtggtattccaattttaaatccttttacttaactatctaacaatcacatcctgtacatcctgatatggcttgcgtcacgctacgctatcagacaaatgaggtaacaaaccatttctttaaaagttaccagatagatgttaaaatttgtcggttaaatattcttagatatgccttttgcaagattttccgggtattattcgtgactgaacaacaacaagatcaaaaaccctctcattcatttgctggtattgctggtatagttgccgcagcaaccttaattagtaaagtatttggtttaattagacaacaggcgatcgctgctgcttttggtgtcggtgctgctgctactgcttacagttacgcctacattatccccggttttttattaatactacttggtggtgtcaatggtcctttacatagtgccattatcagcgttttagccaagcggaaaaaagaagaagcagcgcctttagtagaaacagtcacaaccttagtaggtgggttattattaatagtcacaattgctcagatttttttagcagaaccaataattgatatagtaggttatggtttagaacctaaaaccagagaaattgccattcgtcaattacaaataatgtccccaatggcgttattttccggtttaattggcattggtttcggtactctcaacgcagcaaatcaatattggttattatcaattagtcctttattatctagcgttaccgttgttattggtattggtattttagctttacaatatggtaaggaaataattcagccagaatttgcatttattgggggaatagttttagcaattggcactttagccggggcaattttacaatggatagtccagttaattgtgcaatggcggttaggtttaggaacattgaaactaagatttgattttaaatctcccgcagttcaagaagtaattaaaatcatgacaccggcaacaatttcttcgggaatgatgccgataaatgtagcgacagatttattttttgccagtcccattaaaggcgcagccgcaggttttaactatgccaatttattagtacaaactccgttagggattatttctaatattattttattgcctttattacccatatttgccaaattagcagaaccagaaaactggccagatttaaaattacgcattcgtcaaggactgttattaactgcggtgacaatgctacctttaggggcgttgatgatagctttatctgaaccaatagtgcaggtagtttatcaacggggagcatttaaacaagaagcaacccagttagtgtcctccttattaatagcttatggaattgggatgtttgtttatttagggcgtgatgttttggtgagggtattttatgctttaggtgatggacaaacaccttttaaaattagcacgtttaatattttattgaatgcaattttagattttattttagttaaaccctttggtgcgcctggtttggtgttagctacagtaggtgtaaattgtagttcaattttaatgttgttgtggttattaaataggaaattaaatggtttacctttacgggaatggagtttaccaattttcggtttaactgcgggtagtttcgttgctggtgttgcgagttatgggactttggttgcttgtcagcaggtgttaggaaataaggggttagttgttttaatagttgagttatgtgtttctggtgcagtgggaattggggtgtttgcggttattgcggggatgatgaaagtaccggaggttaatagttttgtggtgaagatgcggcagaagtttttgaagaggtaggttttcctaattatcttttcttgacatcagaagaataataatttaatgaaccacgaagacacgaagaacacgaaggaagaagaaaaagaagaaaagaagataggtaatattaacccggtaatggagtaattctagtgtagagatcgccctaattttcagcaatggtagataaattgctatgatagatgaatattcaacactgttacagctaaggaggaaagattttgtatacagcagtaattaaacaatccggtgattggtggttgggttggattgaagaaatacctggtgtaaattgtcaggaagcaacgcgagaggaattattagaaagtttacgaattacacttttagaggcattagagtttaaccgtcaagatgctatagaagctgcgggtagtgattatgttgaggaagcgatcgcactatgaagcgtggggatttattacgccatttacaggagtgcggttgtgagttgattcgtgaaggttctcgccattcttggtggtggaatcctgagaaaaacagaagatcagctattcctcgacaccaagaaatagatgatattttggcgaaaaagatttgtaaggatttaggtataccttttacacgatgagagtaaattatgttctatgcaagagccttttgaaactcctgaatatttatccgcatgatgcgttgatattcttctatagacagaacgacagcaacgtcacgattttcctgacggatgatcacaggttcacgttgtgctttatctaggattgaggcaaatttttgtttagcttcggtatcggaaataaattgcataattacacctctcttatttttttaatataaacaaaataaatacattgtccataatttatccatcctttaacctcagtccatacaaacttaaagcattctcccgtaaaattcccaatgctatttcctccgcttctttaacagtaatatctgtatctttaattgcctgatctaatacttctcctaacaattgacgaccccattttgcacctaaataatacaattcggggatagaatgagcatcagatgaatacattaattttgtggtagggattaattccaaaagttgcctaattgtatttcgcattccggctacacttaaaaaaggaactgctaaaccaaaatctagataaacctggggatacattgatgctaaatatcccgcttctctcatgtaaggataggaagcatgaagcaaaactaaaggcgcgtttttatattgaggacattctatcaaatatcgtaaatttaaaggatttgctaatcttaaatctaaatctggatctcctaaaccagtgtgtaattgtacaggtattttatatttagcagcaactatcaacgattgttgtaaaataaaatctattaattgtttatcatttaatcgtaaaggcagatcattttttttctgtagttttttaaaatcataaaaatgcacagcagcaaccgcaggtgcaacaggtcgaacatctaaaccactacgataacaggcgatacttttaaacgctacaatgtcaggggatggaggatcaatttctttgataaaagcattgacaaaagtgtgaaattcgtcaatttgtgaaagtagtttttccgctaataattctaagcgtaaaattcttttgaccgtggtaaattgttgatgccaagaaattggtaagatattttccggggttaaaccatcatctaaatatattgcttctaagttagcagcttcaaaatatattctggttaaattttctagtcctaaattttgccgatgtgctaaaattgctgtttcttcgggttcacagtttaataatgtagcaatttctcgtaaactgcggcggtaaaataaggtatgtttagcgtgataatttactatttctggatcataaccttctgtaaaagcggctgcaaagggataatttgcagctacttctgattttaatatgttatgggcgtgttgttcaatgaggggaatttccgagagattcatggatggttaagatttttgagatgtaagtattcaggtatctgggtttctgtgtcagctttttacatgagaggagggaacagggaacagggaggagggaacagattaattttacatttaatatccatctttccgaacatgaagttaaaatatttaactatttttgataaaaatttgcaaataaatatacttaaaatctggtatatttggaaaatatttggataatcttgttatacttgaatgatagttaacaataagctaacaatattatattttatgcaaacacaaacccgaacctatacaccagaagaatatctagaactggaagagaaagcagaatataaaaacgaataccgtgatggagagattataccaatggcaggaggaacaacaaatcataataaaattgccctgaattttgctgctgctttaaaatacggattaaaaaagcaaaattatgatgtttatattggtgatgtcaggttgtggataccccgttatcgtcaatatacataccctgatgtgatgctaattaaaggtgaacctatttatcaaaatgcaaatacaactactgtaatgaatcctttattaattgctgaagttttatctaaatcaactagcaattatgaccaaggtgataagtttctttattatcgctcaattcctgaatttaaagaatatattttaatcaatcaatatcaatatcatgtcatgcactatgtaaaaacagatgatgggaaatggatatttacagaattggaatctgaatcagatactttaacactgcaaaatctagattttcaaattgattttcaggatttatatgaacaggttgattttcataaaagtgttgatgaataaataattaatctgaggagggaacagggaaaaaatttcaattttaatcacattttcccccccccttaatttccccttatcaaggggagggttaggaaggggtaaaaatatttgatacattttgatacatcaatcatgactgttcaaacaacctctgagaatgactacaacgtgaaaaatatatatttataatgaataattttcaacttcccaatttacccttaccatcaccccttgtaggttctgaaattggttcttttactgagtttaccgtaactcaaagaatgccaaatattgcccgtcgtgtcattcaagaaaataaatttaccactgagataaatcaaaacttggaaaaattagcagcagaacttcccaacggatatttacaacctttaaaaaatgacacaggtgcagattttcacgactgggagaaatatctagaaccttataaaaatcaaccttgggtagatgtaccttggttttttgcggaaacttatttttatcgtcttattctcaatattactaattactttcaacatggagaatggcaaggtgttgatccatttttactccaaaaagaacaaggtttagaagctgctattgatgctattatttctttatgtactcaagtacaacaatggttaaatgaatcaaagaaagcaggtaaacctagtaaatcttctctcattgctttattgtatttcgcattatggggaaatagagttgatttaagtttatggtcagcttttgaagataacagaagtaattttgatattcaaactcaattaaataatattttggtagatgattcatttgcagttagtaagctattaactaaatcggaaaataaccgcattgattttgtagttgataatgcaggttttgaattaatttgtgatttatgtttagttgattttctcttgggtagtggttttgcgaatcaggtttatttacatttgaaaccccatcccacttttgtatcggatgcaatgattaaagatgtgtatgcaaccaaagattttttagcagcaggtagtcatcctgatgttaaatcatttgtacaaagattaagtaaaaatcttgattcaggtaaattgattttaacagaagattatttttggacttcacctttaccattttggcaaattccccaatcactgaaagatgagttagcaaagtcgaatttaatagttgttaaaggtgatgctaattatcggcggttgttgggagatttatactggaattatactacaaattttgcagatatagtggcttatttacctgcaccaatgttagcgttacgtaccttaaaatcagaagtagcagcaggtttaaaagctgaagttttagaggaattagcaatattagatcctcagtggttaacaaatggacaatggggggttattcagttggtagatttaggaatctgaagaaattccacatgaaagagaactttacatagcagatcaaactgagaatttttttcatatttaccgtaaatgtcgattagcactacttcatcacctccttggattttagatattgtttgatatacactatttatatatagcaagggtaatttccaaaaagctatgaaattaatttctgaaccatcagttccggtaaaaatccaaaaaatgaaccaaagggtgcgatcgcagcatcccagtattcagcaacgaggaattgaccaaactaccatgattttagatgataatggcagggagaaaaatcaaaatttctcttttatggtaatcggtgatagcggtactaagtctcattatggttctcatcctcagcgtcaagttgcggaaatgatgttaaatcatagtgatgattgccgttttattttacatactggtgatgttgtttatgtggtgggttctcgtgagtattatccgcctaattttattgaaccttaccgcgaatttttagtaggtggtgaaaaccctgaaagtattgcttatgaccagatggtttttaagttgccaattttgccagttttaggtaatcatgactattatgatgtgccttggatgtatcggttaatcacaggttcgactttacctttgcggcggatgttgcgttacaaagatattgagatcggttggcatggttcaaatcaaggtgatgcttattcaagagcttttattgattatttagctgctatttctccccatgaattagaatatcatttagataaatattacactgctaaaagtaatacaggacgctgtttgcgttaccaaccgggacaattcacccgattacctaatcggtattatacatttaattatgggggaattgacttttttgcccttgattctaatacttttaatactccagaaccgttaccagaaaaccaagcgggagatatacgtcgggagttgttacagcgtcgtcaaaagttggaacaagaagagttagaaattttggcagagtgtgataaacttaactccgaaaatcccgaagaatcagaactactggctgacttgggtgctaaggtagaccaacttaatgaagtcaagcttgatattgaaaaacaattagaaattcataccagtgcagatgtggatcttgaacagcttgactggttaagagataggttaattgcatcttggcaaaattcagaagtgaggggacgggtgatatttttccatcatcctccttatgtaacagaagctaccaagtggcatcaaggacaaactttagccgtgcgtcatcggttgcggggggtattggaacaagttgcggcggctttaggtaatataaatcaaggtagaccgcttgtggatgtggttttcaatggccacgcgcactgtttggaatatctgcggacggtggatacaggatatgccgattcacacattaattatatagtttgtggtggcagtggtcgccgtccccgtcgccaacgacaagaaggaacagaattagtagaaagttttaccgatggtaatagtaattctactcataaagtcgccgagtctttgctgtatgtgggacgcagtggttacggtttagagaggaaaaaaccttattcctgcttgcgggtggatgtcaaaggcggttttccggctaagtttattattacaccattagttacagagctagtagagggaaaatggtgcgatcgccaattagaacctattgtaatttaataagctgttgtgcatttaatttgtataagtggaacaggcatcttgcctgttaaacaagagttcagaatgttaggattatacaatttagctgtgtaacagcttactcatcctgttgctaagttgggttgctaagttgggaatattactcacaacctcaaaactgctgtcattaggggttgctgagaaagtctttccgtgagggcataggagtcaggagtcaggagtcgtaggggcgaagcattcagacgacaaattatcaattttatgaaaaggctattttccgaatgcttcgcccgtacaggagtcaggagtcaggaggagatttgaaaatttctttgccatctcttgaaatccccaaaaatgcacactttttccggtatacccttcaaaacccttgcactaatttctgtgtttatcagcctctaacctttgatatatcaaggttttaggtttattcagcaaatcctaattaccagagtttgttggtttccagtttaaaggatttaattatagtgtcttccacagtttttacaaactctggatagaatttatcttcagcgcgataggtgagaatataggctttttgaccattaacaatccatacttgcatttcttggaaatttaccttgtgaatattatctctgctttcataaactacttgataaccttgtgtttcaccaagttgtataggttcagatttgataattttcgtattttgtcctgattcttcaattcgttggatagaaaacttagtataatcttccaaagtttccgacgagaataactcctctgtagtgataaaaaactctggagttagagaagatgaaatcgtatttttcggaacaattcgtgttaattgatctatagctggcgtttcttcccaatctttaggatattgaaacttaatcccagattttgcatattctactacttctactacttttggtggtcgcaaataactattaacacctatcacaccaacaattattggcaatatcaaaaacaccgatttgatcaataaaggctttaatgtttcaagttgtttaggaataattgttggtggttcagtcagtggttcagtcagtggtttacttattcgagattcatttatagccttcatcacttctgctgctgattgaaaccgatgtctagggttaaccttgagcattttatctaaaatattagctagagaagggctaataattctactagcttgttgtcgccaattttggtaattattgctaaggtaatcaacgggagttgtacctgtgagtaactccagacaagtaacagccaaactatataaatcactagacggataaatttgtcctattattccctcttcaggtctttgttcaggagcagcgtatacttttgtatgaaaaactatagctgattgtacatttatttgaccggagaaaacctgttttaccgccccaaaatcaattaaaaatagtttttgtgtggctgtttctctaacaatattactgggtttaatatctcgatggatagaattttgatcatgaataaattgtaaaatcggtaaaatttgctttaaaaaatctaaaatctctgtttcggaaaaacgaccttttcttttgagttcctgagatagatcttcaccttggatatattgttgtactaaatatttaaactcaagttctttttgttgaccaaaagcaggagcagtaaaggaaaaataatcatataaagtaggaatattcccgctattatcacctaaaaattctaaaacctgagcttctcgatcaaaagctgctttgattccttgaattattctgttaacaacctctggatcattatttgcggcttgaatcgcatcaactttagcttgtatctcatcaactttaatattcaatcgtttgatcacacattgacgctgattcacagaatctaaatcaatagcttgaaaagtagcgccaaatccccctttccccagaggtttaatagtttgataatgtccctttctcccctgtaatattaggggcattccacaagcttgacaaaatattcccgaattagtgtgagaatctggagagtcaggaaaacggttttcaggactagggcagtggggtcgggtacaatagtacatgatagataaaataatacatgatatagttacagtattgatccatcagattggattgtatcataaaatgaacttctaagtaaacacctgaatattttcaaaaaattagtatataatcagttatgtgtgtatcaagtagccttgctgaattgagacataaaaatcgaaaattccatgtctcaaactccgcgcctctgcgcctctgcgtgagaaaaattcatattttcactcaccaacacctataaagtttaaaagaaagtagcgccataatcaccaaaattcagtaatcaaaggtcaagtattatgcaactaccagcattaactagtgtcttaacattcaccgcattgacagttaccctgagtgttaaccctggtttgagtcaagagattcccaagcaagaagttagttttgcttgtcgttcaatttcttacaaaggtaatacggaaaaagttcccactaccatggccttcattcccaacaaaaaacatgacccttatgtacccataattgcttggagatccgactcttttcccaatagcggatggactcctacaaaacgctgtgaaacagtaagtagaaaattccagcaatttcaccaacaaggccaattagattatttaacaaccggtaagttgaacggtttgggagttatctgtgcagctaaacctggtcaatgcaataaaaacaatattttatttagtgtcagaccaggtgtaaaccccactacagttttagctgaacttaatgaaatcagagaaggtagaacttcagacttaaattggcaaaattccggtgaaaatacttacttgaatctgggtgaatatctcagaaatatctctaaatcaaaataacaaaacaccccatcctcaccctcacccttgctaagaggttgtttggaaagtattagatgaaaccgataatttccaaaaacctaaccccccttccccccttccctacaagggaatgggggtttcaaagcctctccccgacgcggggagaggtttgcagaggggtttatttatacattaaacacctttcaaacatcctctaaggggaggggacaagattccggtttccccactttacaaggggattaaggggggtaaaccactactaacaaaaacactatttaactaattatgaaacgtcaaatcgccattatctcctgcttactactgctaccctatccagtgtcagcaatagaaacccaaatcaaaactacaaaacttacaccaatatcccaaaagtgcaaattacaaccagcagaccgacaaaacggcatttatttaaacctacaattagaaaccattgctaaacaaattacagttagagtcagagacaaagaaagaggcgcttccgggacaattttcgctagaaaaggtaactcttatttagtagtgactaattcccacgttgtcagaagaattaataacatcaatattatcacagccgatggtcaaaaatatccagctaagatattacctaatactaactttgatcaatttgatttaactatattagaatttacatctaatcaacaatattgtttaccatcagaaattgcggacagaatcgcctcctttgatattaacttagaaacaccagttatggccgcaggatatgctgtatctgaagataaattagtattgacaacaggagaagtacaacaaatcatctcccaaccgagtttaaaagatggttatgaaattggctataccagcgatattcaacaaggaatgagtggcggtccaattattagtaatacaggaaatttaataggaattaatggcattagttcctatcctttagtcaattctgcttatatttataccaacggaaaacgccccacaaatccagaaattcaagagttcagaaaactgagttggggaatacccattaaaaccgttttagctcaagttaaaccagaagttctcaccgcttataatttacctatcccagatattaaacagacaatagcagaagtaccattaacaggttggttaggagaactagaagcaaaagctcaacaaattaccgtcagaattgatagcagtagcggtactaatggttcaggggtaattattgctaaacaaggaaatacttacaccgttttaactgcggctcatgtagtttgtaaaccaccagataaaccgggaaaatgtgagccaaatacttataaaatcctcacagtagatggtaaacaatatcctgtagaaccaagcaccattaaattagaagagggggtagatttagcggtagttaaattcaccagtcgggaaaattatcaagttgccaccttagcagattatcctactaaagataatgaatatatgttcactgctggttatcccaggttaggagaaaaatcaccttggcggttcacattgggacaaatttatagtaaagaagaaggattattccgaactacccaatcagattttatcagtaacagtttgggtacagcccaagcagcagtttctttaacaggaggatatgaattagtttatagtagtatcacctttggcggcatgagtgggggaccggttttagattcccaagggcgggtaataggtattcatggcagaacggagggagaagctgctattgataataatagtaatagtaaagaaactatccaattaggtaatagtttgggtattcctgtgaatacgtttttaggaatagcaacccgactgaacacctcagcacaaaaggtagaaatcactccaacaccagaactaaatccacaacaagttaagtctattcaaacagcgattttatcagtagatgtgtctcaaagtaatactaccgccagtcaatggttagcaagaggaaatcaactgtggcggttacgtcgtcatccagaagcaatacaggcttttgatgaagcaattaagcaaaaaccagagtttattcacctggcttattatggcaaaggtttggcgttatattggagtggaagaaattcagaagctataactgcattagaactagcagtgaaatttaaacctgagcttgttcctgcttggaattatttaagtatagtttatagagaatcaaaccaactggataaagccttagcagccataaataaagccattcaattccaggccaataatcctaatttgtatgctcagaagtattcagttttaatctctttaaaaagatatagagaagcagaggcggcgataaataaagccattgaactcagtccccgtgcagtattttactttatccggggaattgtccatttgcaattaggaaatacgcaaggagcaatagatgattctaacctagctatcaagattaatcctaaccttgctgaagcctactttctccggggaggtactcgttggcaattaggaaatacgcaaggagcaatagatgattctaaccaagctatcaagattaatcctaaccttgctgaagcctactttctccggggaattgtccatttgcaattaggaaatacgcaaggagcaatagatgattctaacctagctatcaagattaatcctaaccttgctgaagcctactttctccggggaattgtccatttgcaattaggaaatacgcaaggagcaatagatgattctaacctagctatcaagattaatcctaaccttgccagtgcctactacgtccggggaaatgtccgtaaggaattaggagataagcaaggagcaatagatgatttcaaccaagccattaagattaatcctaactttgtctatgactactttctccggggaaatgcccgtaaggaattaggagataagcaaggagcaatagatgatttcaaccaagctatcaagattaatcctaactatgccgatgcttactacggccggggagttgtccgttctgaattaggagataagcaaggagctatagatgatttcaaccaagctatcaagattaatcctaaccatgcctatgcctactacaaccggggaattgtccgtaaggaattaggagataagcaaggtgctatagatgattacaccctagctatcaagattaatcctaacgatgccgatgcctacaacaaccggggaattgtccgtagtgaattaggagataagcaaggtgctatagatgattacaaccaagctatcaagattaatcctaacttagcccaagcctacaacaaccggggaattgtccgtaaggaattaggagataagcaaggtgctatagatgattacacccaagctatcaagtttaatcctaactttgccaatgcttactacggccggggaattgtccgtaaggaattaggagataggcaaggagcaatagatgattacacccaagctatcaagtttaatcctaactatgcctatgcttatcatgaaagaggaaatgttaaatctgctttaggggataagcaaggagctatagcagattttcagcaagctgtgaaactatatcaacaacaaggaggtaatgaatactggttgagaatagcccaagatagaattagagaattacaacaataatagtttgtctgaatcaggataaccaggatttgagggcggaatgcctgataccacaaatacaacaaatgttactattaaaatacctcgtagtaatcagtttacaccggatgcactacagaccatcattcaacgtattagtttgggagatttgccatgaaagttaccattaaagatagtcaaatactcaaaacagttcaacctgaaattatccaaacacatctacaagctacaggatggcaggaaacaggtagaatttataacgatgctggagcaatttggcgatttaaaaaagactctattaatgaatatgaaattttgctacctctgcaacagaatttaggagactatgctgaaagaattagtgatattttgaaaacactagagatagtagaaaatagaaatcaatttgatattttaagtgaatttatcaccaattatcctaactttaatattcaaggtattgtcaaggaaatatccactccagaaattgataaactgagaggagaaattacattattaggtgcagtatttgagaaattacaagaaattaaaacagttctcaataatcaggattatatcttagctattaaggcttatcaagaacgattatcaattaattgtatgggtgatttaatcaaggaagataatcattttattctcaaaaatcccagaaatttacaaattgactgatgaatattgactgttgacgttgtaattaattagggtttgctgaataaacctaaaaccttgatatattaaaggttagaggctgataaacacagaaattagtgcaagggttttgaagggtataccggaaaaagtgtgcattttttgggatttcaagagatggcaaagaaattttcaaatctcctcctgactcctgactcctgactcctgactcctatgccctcacggaaa

SEQ ID NO: 95 - DNA, 15941 bp, Sphaerospermopsis sp. LEGE 00249
  LEGE00249_113
gtcgaagggcggtgtcgaagggcggtgtcgaagggcggtgtcgaagggcggtgtcgaagggcgcagtcgaagggcgcagtcgaagggcgcagtcgaagggcgcagtcgaagggcgcagtcgaagggcgcagtcgaagggcgcagtcgaagggcgcagtcgaagggcgcagtcgaagggcgcagtcgaagtaagcgtggcgttagccatacttctgaacttctgaacttctgaacttctaataaaattatggctatttggttgactttgtgtggggtagtggttttattagcttaccttttgggttcttttcccactggatatcttgcaggtaagttattaaaaggtattgatattcgtgaagttggttctggttcaactggtgccaccaatgttctgagaactttgggtaaaggtccgggggcttttgtgttatttgttgattgtttgaagggagtattagccataaatctggtttatgctttattcaattttgctcctggttataatgtcatacctgcaaatttaaatgtgcaattatggcaaccttggttagtaactttggttgggttaggggcaattttaggacatagtaaatcaatctttttaggttttactggtggtaagtctgtggctaccagtttgggtattttattagccatgaattggccggttggtttggctactttgggggtttttggtgtagttattgctatatctaaaatcgtttctttaagttctatttctggtgctgttgctgtttctattttgatggtggttttccagcaacctttagcttatgttttgtttagtattgctgggggtttatatgtaattattcgtcatcgcagtaatattgaaaggttgctgacaggtacagaacccaaaattggccagaaggtagaaactgaatctcaacaaacagcgtaaataaagcctggtaattaattcccagtttcatggaatttggctatcgaatacttggtttatttacgccgtactgtactaccatctttttgtgtgggcatcgcatctatagcgtttcccagtctcttgaggtacaccctcatttatttactgttaccaattcccaatttccaatttccaattccctaagatcaaaaactctgtacctcactaacttggtaaatgctatatctatagatttcttgatttatttttctttcttggggggcgaaaattgatagttgaggggttgactcggcgctgggggtgcgctactattataatataatggagtgttgctaaaatttttaaaataagcaatacccgattattagagcttgtaaagataactttaccaggaataaataaaaaaagcaatccctttctagccgccaaatcataaatttttacctatttttgatgcagtttcataattaaaaatctatattaaattagaaattataaagttttataactgataactgattactaaatgttgacaaagatggttaaaatagatagaaaagtctatttttacaagccgttatgtctacagaatcaaatattgaagatgtacaagcaccaattaatactgcaccaccggaagttaaacagataattgagagagtttgtaggttagaaaaatcaagacttgcgagaaaaagcaaaggtgcaattaatgatgatattttaggaataatcaaagaagcagtgaaagaagtggtgcaggaatgaaactaacctcgattaaactttgtaattttcgttctttttatggacagactccagaaattaccattgcgacgggagatattaaaaatactacaataattcatgggaataatggagcaggtaaaaccagtttattaaatgcgtttacctgggtgttatatgaaaaatttactgctgcgtttgctgcgacagaacagttagtaaataaaagagcgatcgcagaagtagaaaatgaacaacctgtagaatgttgggtagaagttggttgggaacatgaaggaaaccgataccgagcaaaacgcacctgtcgagtttataaaaatgctaccaacatggaagcaacaaaaacaaaattaattattcaaaccgtaggagatgacggtaaatggtattttcccattgaacaagcagaagagattatcaataatatattaccagcaagtttacatcaatatttcttttttgatggggaacgcatagaagaaattgtgaggtctgataaaaaagcagaaatagcagaagcaacagaaacatttttaggagtcaaagtaattgacttagcaattagacatttaaaagaagcaaagaaaaccttagataacgaacttgctgctattggtgatgcagaaactaaacaattattaaaagagcaaagtaaactagaacaagaaatggaaagaattaataaaagacaaacagaaattaaaaaagagttagaaaatcaacagacatttaaaaaagatataagcagtcggttgatagaactcagtgcagtgcgagaattacaagaaagacgagaaagtttagaaactcaaaaacgtagtagttatgaagaactgaaaaaaactaaagaagcactgaaaaagattatttccaaacaagcatacacagtattattaggtcaaacaaatgcaaattttcggggaattatcagcgaattaaaacaaaaaggagaattaaaatcaggaatttctaaagaatttgtcgcggaattaattcaaacaggaagatgtatttgtggagcagaattaaaagaaggaggaaatggacattttcacgttaaatcacttttgaaaaaaaccggatcttcctctgtagaagaaacagcaattagaatgggagcgcaagttgatgatattgataaacaagcggataatttttgggataatgttaatagagaacaagcaagaattagtcagatcaaaacatcactttcccaaatagaaggtgagttagataatattgaagaaatcttaagaaaagatcccaatgaagatattagcggtttacaaaaacggttagatggaattgaagcaaaaatagatgaattaaaccgagaacaaggtgcaaaccaacaggaaatttctcacctgaaaacagaagttgatgtattagtcaaacaaattgctaaacaaaaacaaaatgaaggaagacaaattttagcacagcgtcgtattattgcaactcaagacgcaattgaaagattaacagaggtgaaaaatagacaggagaaacaatttagattgcagttagaaaagcgagtacaggaaatattttcggaaatttctgtcactccttatattcctaagattacggaaaaatatgaactaactttagttgaaaataccacaggaatagaagcaccagtagcagcatctacgggagaaaatcaaattcttagtttatcatttattgcgagtattattgataaagtgcgggagtggagtgaaaaacgaaaaatcatgatggttcctgatagtagcacttttcctattgttatggattcaccttttggaagtttagacgctaattctcgtcgtcacattgcacaaactattcctaaattagcaaatcagttagtggttttagtgacgaaaactcaatggagggtggaggttgaggaggaaattattgatagaattggtaaggaatatgtgttaacttattattcttctaaacctgactgtgaacaggattttatggaggtgaatggggagaaatattatttgattcgtcaaagtcctagtggttttgagtatactgaaattgtagaggtggaaaggggttaattgttctcacgcagagtcgcagagtcgcagagagaaacagaaaaatttatctgcgtttatctctgttcatctgcgttctattttttatctcacgcaaagacgcaaagggaagaaagcaaaggagaaagaaaaaatggttgctatttctgatcggttttatctcactccccaagagtttttagagtgggaagagttacaggaaattaaatatgaatatcttgatggtgaagtttttgcaatgactggaggtagtattcctcatgctgcgatcgctttaaatttagcttctgctttgaaaagtcatttacggggaagtaagtgcagtgctttgatgtcagatgcaaaggttggagtttctgaaaatggactttttttctatcctgatgtggtggtgagttgtcatcctcaagatagacaagcgattaagtttttgcaatttccttgtttaattgttgaggtactttctcagggtacggaagcttatgatcggggtaaaaagtttgaaaaatatcgcaatttttctagtttacaggaatatgttttgattgattctcaaaaaatcggtttagaatgttttaggttaaatgatcggggtttttgggaattacatccttttgttgagggtgatgaagtacatttaacaagtgttgattttcagtttcctttgtctttgatttatgaaaatgtggttttggtgggagaaaatgaggagtttaaggatcaagcaggttaatttttgatgacaaatattatctgcgtctatctgtgttcatctgtgttttatttttttctcacgcaaagacgcaatttccgtcaggagatcccgcagggtagacgcaaaggaaagaaagcaaagttttgattttagttagtaccatttgttgtaaaatattgggagttgagattttaagattatggcggaatctggtagaatcagggtggctaaggataaggctgatttggtgaagtctttaatttcttctgatgggggaaatggtccttttcaaactttcgctgatgtgattgtttttgctgctgctttgggggttaagtataagaagcgtgttccttttgaggaagtttctaaacgtgaacctgtacccatcaggttagaaacattcatatcaatgggatatgatgttgttattaaattattaggaattgtagaaactgagaatattcaaattttatcccctaatgaggaggaatttgaaaaacaacgtaatgaaatttttgaagaatacgctaatggtggtttagaagttttacaagatgaactgaggggatcaatagattattctgaacgaattttattgtttttgatatgtgataaagaaaagaaaaatgaagagagaggagagttatatttaagcgacttaataaattaagaatttataatttatttaatgacacataaccagttattaaaaacatgaacactttatcattatactgccaaaagttatctaacctgaatgttagcaacagtaaaaaacgtggtacggctttacataaaccaatattgattttatcagtgatagatttaatcagtagagatattattaacacaaatgaaattagagtttcagatgaattaattgaaacctttgaaaaatattggcagataataggatcacattcctatacaggaggtttacattatcctttctttcatttacaaagtgaaggtttttggcatttagaatttaaacctgattttaatgggttacaaccaaaaacaaccaacaaattaaaacaagctgtagaatatgcttatttggataatgaattatttgagtttttacaaaatgaaatttctagaaaagaactactagatgcactaatagccgctttttttcatgatcaagataaccaaatagatagcattttacaaattaatcaaaattttgaaaatgaaataataatacctgaacctgctgaaaataatcctaaatatagattacaaaaaacaattatcagaaatgctttctttagaaaagcagtagtttctgtatatagttgtcaatgtgctttttgtggtttaatggttaatcaatatctcaatcaaaatatagtagatggcgcacacataaaaccattttcccaattttatgatagtagaatacataacggtatagccttatgtaaaaatcatcattgggcatttgatagaggttggtttggtgttgatgataaatacaaaattattgttagtaaagaattagaagaagtatctccccacgctaaaccaataaaagattttcatggtgaaaaactcatattgcctaaaatagagaaatactttccagatattgaagctttacaatggcatcgtcaaaacatttttcagcaataactataaaactggtggtaaaccaacatcttgcggatcaaccaactttccatcaaaaccaatagtattatcttccatcgttctcgcatcagctaaagctttacgcaattgtgcaacctccattttttcagtcattccccccaaaatataaaccaacaacttcaccgctaactccttacctgaaacttgaacccgctttttattcggatcatataaaaccccataccataaagaatggggaaactccatttcactaaaaccaccttgacgatcaaattttcgcaacttcttaaaaatagcttctaaagacataccttttttaaaaaccaaaattcccaaagcttgcgctaaagcaacttgagacactggacgaaataaaatatttgcctcaccaccacctttttcaaaactaaaacgtcttaaatttggtgtatcttcatgatctaaaattttataactgggaagactcgctaaataatcaaataattctgtaaaatctgcaattccttcttgtaattcttcatcatctggacgttgaggaattaaccctttttctaaaggtttccaatgggggaatttttgccctaaatatgtagtagacatatcctgtaaagcttgcagtgtagtcaaaacagtagaattttttgctactgtagcactattccaattgatacgcggtttgcgcttttctttctctgcaaaaagtggatgtgtcaccgcaatttttcgcgctacaattgcaaaaccatcatcttcatttaactgtgttaactgacctttagttaaaggtgcagccattaaatttacatgaacaaaaatagacctaactcgctgttttgcttctgtataagtctctccagtattcaccgcacaaataaactcaatgccgattttttcctgtggtaaattttgcaaatcatcagcatcaatttgagaatcatctatcaattctgaaagattaatataactatcgctataagttttatcttttttatatcttctcaatttaccagtttgcagtaattctaataaaccttgaactcccattaatctatgctgaccatctaaagcataaatactaacattttcttccgctacatttaacaaaccaaaagaaccattttcatctagaggaataaaatctgtagtagcttttttagcacgtccttcactattccactcatctgcttttgcattatcaacccaagattgattaattacaaccaataccgggggaaacttatggttttttcgtgatgctaaatattgtactaacgcagcttgacgcgaccagtctaacggacgttgctgaacttcatcaatactatctgcatcaatttcaatattctcggtttcggaattataatttttttgcaacagaggtaatgtagaagcaaaattaactctctttgcaaaccattctaaagtaaccgcacctacataagcttcaacacctcccatttttgtttgctgaactagaatttggtcttgtttgtcaaaaaatgtcttgagtaatgtagataacatctgttgactttgagtttcattttctgtgtactgttgagaaatgttacaattttgttcaaattggctgtccataaggttaatttttaaaaactaaggttgagactgagttgcttattttcccaaaatattggatactaaaagtatagtttttaaaaacaatttttaaaagttaatgtaaactaacttagtataaataatttttgaatttgcatttatctcaatacatataatccaggtacatctatataattacaggtagggagtcatgactatagcaccacaaacagacagtaaaaatcagcaaaatcgcactgtagcggaattggtagactatattcaagttctcaccacagaaattcaggaattatattgtttggatgcaataccttgggttgtgggttattctgggggaaaggacagtacagcaacgttacaacttatttggaatgctatttctggacttccaccagaaaaaagaactaaaactattcatgttattaccacagatacgggtgtagaaaatccctatgtttctgcttgggtacgtaattcattaaaacaaatggaaatttctgcccaagaacaaaaaatgccaatgacaccacatttattacaaccagaaactaaacaaacatattgggcaggtttaataggtaaaggatatcctgcaccccgtcatacatttcgctggtgtactggaagattaaaaattgatccttctaaccgttttattcgtgatgttgttagagctagtggtgaaacaattgttgtattaggaactcggaaaactgaaagtagaaatcgcgctttaattatgacaaagagagaagaaggaagaatcagagataggctttgtcctcatcctagtctcattaattctttgttatatacacctattgaagattggcgtaatgatgaagtttggttatatttaatgcaatgggaaaatccttggggacatagcaataaagatttatttaatatgtatagagaatcaacagcagataatgaatgtcctttagtgattgatacatctactcctagttgtggaaattctcgttttggttgctgggtttgtaccttggttagcagtgataaatctttaaacgcaatgattcaaaatgatgaagaaaaagaatggatgcaaccaatagttgattttcgtagagaattagatattgaacacgatagagaaaaaagagattttcgccgcatctggggagaagtgcaattatttgaacggaatagaaatggtgaaacatcagttgaacccatacccggaccttatacaaaatattggcgagaatattggttaaggaaactattaaccgcccaaacagaaatgagaaaaaacgcccccgaaaacatgagagatatcaccttaatatctatggaagaactcagcgaaattcgccggatatggttagaagaaaaacacgaatttgatgatagtttaccccgaatctatcaagaagtgacaggagaagaatttaaagatccccgtcctggtgcagattatagcctactgggtagcgatgaatgggaagtattagaagaaatctgtcaaggtgacgcaatgcaattagaactaatggcgaaattgttagatacagaaagacaatttaagaaaaaaacgcgccgagtagggatttttgatagtttagaaaaatgctttgaaaccagttctcgttctcaacaagatgctattgattatgcccattttaaaagagatttacgacaagcagcaagtgaaggagatatagccacaattcgcgcagcatttaaacaattaaatatcggtgaaacagcagaaaaagaagaaaatgaacaaccaaataaaccagcaaattttgcgagtatgaaatttaagaaaaaagaggagtagattatgttacaaacattaccacaacttatagacttagaagaatttcttgactggtatccagatggatatggacggtttgaattacatgatggagtcatttttgaaatgcaaccgacgggaacacatgaacaggtatcaggatttttagcacagaaattaagtgtacaaatcgaacaaaataacctactttattttatccccagacaatgtattattaaaccagtagattctgccaaatctggttataatcccgatgtcattgttttagattggaacgtcattaataatgaacctttatggaataaacgttctacaattacccaaggtgaaacggttcgtttagtaattgaagtagttagcacaaattggcaagatgactatttaatcaaattagctgaatatgaaaaattaggtatttctgaatattggatcactgattatctaggtttaggtggaagaagatatattggtaatcctaaacaaccaacaatttctatacataatttaattgaaggagaatatcaagttagtcaatttacaggaaatgatgtgttaatttctgcggcatttcctaacttgaatttaacagctaatcaaatttttagaataggtgataaaaggtaaaaataaatccttcatttctagaacgagaaattggcttctctgtgcctctgtggttcgtttaaaaaactattaatttttaaattttaactctcatgatcttcctagaactcgtactgcaaaacttcggtccctacgctggtagacaagtcatcaaccttgatcccagaatagatcaagataatattcgccctatcatccttttaggaggaatgaatggtggcggaaaaacaacattaatggatgctattcgcctggcattatatggacaacgcgcccaatgttctactagaggaaacttgagttataatgattttttaactcaatgtgtcaatagtcaagctgatcccattaataaaacccgaattgaattagtttttgaacacatcgaagacgataaaccaattcaatatcgtgtagtgagaacttgggaaaaaaatcccaaagacggtaaagactcattaggaattttaggaaaagatgaaacttggcctgttgattctttagctactatttgggatgaatatatagaaaatattctccctttaggtatttctaatttatttctgtttgatggggaacaagtaaaagaacttgcagaacaagaaacaccacctgctgtagttgtagatgctattaatggacttttaggattagaattagctgataaattagcagtagatttagaaatattagtgaatcgtaagaaaaaggaaactgctgataaacaagatttagctaaattagaagaattagaaaaccgtttagcagaacaattacaaaaagaaaataataaacaaaaagaattagaaaaattagaaacagatttaaaagatttaaaaattcaatatgatgaagcattaaataaatatatttctgaaggtggaaaactcgctgctgaacgtagtcaactagacacccaaaaagaaaatcaagttcaaaatgcagaaaatatccgtaaatcattacgtgaattagcggaagatgtgctaccattagcgttaattcctaatttattatcccaaattcaaacccaaggggaaaaagagttaaaatttcaacaaatgcaattagcaaaggatttgttaattgctagagatcaacgtttactaaatttgctcaatcagctaaatttagaattagagaaaattaacagtattcaaaatttcttagttgaagatattgataaattatatgctgttaattcatctacagaaaccacttggttaaatgctgatgaagaaagtttaactttgttagataatctcgtataccgtttacaaattgccaaaaatacagctaatgctaaaatattagaactgcaaaattacgaagaacaaatactcaccatagacagacaaattcaaacagcagcagcaccagaagcttatgcagaattacaacaagctagggaaaaagccgaaagagaatggaataaagcaaatagtaatgtagagtttttaaaacgtaatttattagaattacaagcaacaattgaaaaaaccaaaaaagaactaactaactatactagcgatagtttgaaatatcaaagtacagaacatttaattaatgcagtcactaaagtacaagcaaccttaaagatatttagagaaaaattgacattaaggaaattgaataaattagaagaagaagtaaaaaactgttttctttatcttctgcataaatcagatttagttcatagaattgccattgatgcccagacatttagtatatcattatatgatttaaaaggaaaaccagtacctaaaaatcgcctatcagcaggagaaaaacaactattagcgatcgccttcctttggggtttagcaaaagtatcaggaaaacgtttacccgttgctattgacacaccactaggaagactcgactcatcccacagaaacaacctagtagaaagatactttcccgcagcaagtcatcaagtaatcttactttccaccgacacagaaatagccaaaaaagaagtagaactcctgagagaaaacgaagcgatcgcccgtgaatacctcttgcaatataactccggtaaaagagaaactacaataaaagacggttatttttggtaaaatatcatctagtatttcacaaagttaaatatgacaactcccttactaccaaccttacaaaaacttcccaccaacttacccctagaaggtgcgatcacaatagaaatacaacaaggaacaccaatatttcgcgcctccatcagcgtacaaaatcgcattgaaaacctactaacaaaacaacaaaatacagaactaacaccagaagaagaacaagaactagacagttatgaagaaatagatgattatttaagttttctgaatcgcttagtgcgtaatattgccaaaaatcaaaatattacaaatatataacagtagtgaataaaaaaattagtgatgcaattcagcaacaagtacgcaagcgagcattagaactatgtgaatattgccacgcatcagaaacatggcagtatgtattattcaccgtagatcatgtaattcccttgagtaaaaatggtcaagatacaatagataacttagccttagcctgttttcattgtaaccgcaaaaaatccaataatacaacagcaatagacccggaaactggtaacgaagttgaattattcaatcctagaaaaaacaaatggagtgaacattttatttggtcaaaagatggactaaaaataatagggataacacccacaggaaaagcaacaatagcaaaactatacctaaacagagacagaatcatcaatattcgtgctgccgataaaacaattaaccgccatccacccccagaagatcccatttcttcataaaaatttagccagccaaattttaccctctttcttccttcttaccttcgtgtcctttgcgcccttcgtggtttattaataaaaaaatatggaatcaccaatagaacgtattagactatcccaaacagccaaagatcaactactaaaactcaaacgtaacaccaaaatagaacaatggaacatcctatgtagatgggcgttttgtcgttccctagcagaaaccgcccccccatcacccgtacccatcccccaagatagtaacgtagaactaacctggaaagtatttgggggagaaatggctgatatattgctattggcattgaaacaacgttgtcacaacgacggtttagacaccgataaagaaaccctcatcacccaatttcgtttacacctacatcgaggaataggatacttagccggagatccaaatattaagagaattgaagatttaatagaaatggcaacaaagaaagtaaaatcctgattttacaacgttcagccgtatctagacatgaactacacaatagtcatgtcaacagcaacaatggtaagaaaatttttaatacatgaacccagtacaatcgctattaaaagtattcggtagccgcaaaatggcggctttattattactaggtttttcctctggtttacccttatttttaaccagcaaaaccttacaagcatggatgaccattgaaaaagtagatttaactgccattggcttatttagccttgttggtttgccctattccttaaaatttctttggtcgcccttgttagactggattaaactgccctttttaggcaggagacggggttggttaattatcttacaaatagggttattcatagcgatcgcctgcatggccttacaacaacccaaacaagccctacaactactagccatcaacgccgtagccatcgccttcctcagtgccacccaagacatagccgccgatgcctaccgcaccgacatactcgaacaactagaaatgggtgcaggtgcagccgtattcgttttaggttatcgcatagcattactactcacaggctcattagccctcatcctagctgataaaataccttggtcttcaatctacttattaatggcagtggctatggcagtaggtattatagccaccttatttgcaccagaaccaaaagaaaccatcccaccagaatctttaaccgcagccgtcatcttaccctttggtgaattttttcagcgtcagggcatagtttacgcctctttaagtctcctgttcatagtcttatataaactcggcgactcctttgtgaataatatgtccacgccgtttttgctgcaaacaggctttactcaaaccgatattggcgcaattcaaggtggcatgggactaatagccaccatagttggtacactggcaggaggcgcatttttgagtaaaattgggttaaatcgttcactttgggtatttggtgggttgcaagcaatcagcaacttagcttatcttttacttgcacaagttgggaaaaattatcaggtcctcttactcacaatcaacatcgaaaacttttgtgcaggattaggaacagccgcctttgttgcttttttaatgaatatgtgtaatcagcgttattccgccacacagtatgctttactttctagttttatggccgtcagtcgtgatattctagttgcgccagcaggttggttagcaaaaactacaagttggcctttattttttgtgattagtattgttgctgctataccgggactactcctattaccgttctttgccccttggaatcccaaaccagtgacagcaaccagaccaggacttgaagaagaagaggatatatgggaaaccaagtagtaattcttgtcggtacattcgtcctcgttgtcacaggtttattactgggctacgtactctcacaattagttttaggatatcttatctttagccccctcactctcctgggaacaatcagcttagttctaatttttggcacactctattacgttttattttggcaactaaaaagagaacagttacaaccctccactcccagcttacctaatcaagtagacgaggaaatcacaggtaactatctcaaaaaccgactcattgccagattatccggtgacgtagccgcagccgaaagattaatcgaacaagccaagcaaaattatcctggaatgccagaaaattggtattgtgaacgagtcctggatgatttggatcgggatgcacgttaacctttagtttttcctgcctccaaactcgctaaaataaattaagaaaaatttacattaactggttttccaccagttacctcattatttacaatcccgaatatggctttttttcgtcaatacatcgcccccctactcgtagttctagtatttttgattgccctagtcgcagtcagcgcccggattttcctaccctccgacatggccgcacccgcacccattggagtgatagttagtaatttgtaaacaagggaacaggtgactggggactggtgacagtaaagaaaacttgagattttagattttagattggagatactcaaaacaatccaaaatccaaaatccaaaatccaaaattgaatcgtcccatgcccaattttgactttcctttggacggctattctattcgccgaggttctaccttagacaaagcactattggttaagtttatccagcgtacttaccaagaactatttcctactcaagatttttctcacctcgcccgtacagtggaacaatatttctccactgacacccctttgtggtgggtatatgaaactcagggaacagggaacagggaacagggaacagaaggcaggaggcaggaggcagaaggcagaaggcaggaggcaggaggtaaatatttcttcccagtccccagtccccagtcaccagtcaccagtcaccagtccccagtccccagtcaccagtcccc

SEQ ID NO: 96 - DNA, 15705 bp, Sphaerospermopsis sp. LEGE 00249
  LEGE00249_114
ccccagtccccagtccccagtccccaatatttaccaatttctccatcctcccttgggtgcggtttcagtttctcctttaaaaccgtgattttgcataagtatatggtattccgtactacttgcccatcgatcaatttccctggctcgcaatacgggtactgggtggcttaactgggcagtgcgggcttctttcaccattacacccagttccgttttactgatgtcatcataagcacgagattgggcaacaaaagcatcaagatttaattgaggtgctaaggtgggagaaccaccagctaacttcattaacacagacatgacaactttggggttttgggtagctaacaaagcagcgcgatcgcaagtaaactctgcacaacgtacccattctaataactgtgcttgtaatgtttgagctaaaaccgcacccacattaggtaaaattgcagctgctaaaatgagtaagttcacaggtgttaaataaacactatgatcgcatttgagatgtcctaactcatgggcaataaccgcttgtatttcttctggtgtgagcatatcaattaaagaagtatgcaacaccacaaacggctgtttaccccgcattgcaaaagtataagcattaggggcaggatgttgacgcacgtatagttgaggtggttcaatatctaaaatattgcaagcgtctaataataaattgtgtaaatttggtaattgtttttcacctaccaagacactagcagcaatattttctacataaaaaacctgttctgccattggacctagccaatttctgaccatcatatctataccaggaatttgcttgagagtttttgtagcttccaagtccagaggatgacggaatgagtcagcttttaaaccaattagagcagttttaactaaagacataatgatggcaatcaataaaaaatattattcccacagatagtatagcgattaggatagcgatttcagacccgtgataaaacccaatacttgtgggtacaggcgatcgcctcaaactcactcctgggagtacgggtaaccacggagggtttgcccctacgactgtatctaaaaagatgtcaaaaattaattaggaagaaattatcatgtacaacacaactcaacctgatccagttcgtttagaaatattcaaaaatctctatcaatttatcgccgaacaaatgggaattgtgctgcaaaacacagcagcatcagttaatattaaagaacggctagatttttcctgtgcgatttttgatagttctggtttattagttgctaatgctcctcatattcctgtacacttaggctcaatgagtgaaagtgtccgcagtttaattaatgatgttggggacacaatcaaaccaggaaatgtttatttatccaataacccttataacggtggaacacatttacctgatgtcacagctattactcctgtatttttaggaactaacataggaactaaaaacaatattcccagtcctatattttatgttgcttcacgtggacatcaagcggatattggtggtattactcccggttctatgcctcctcatagtaccacaattttagaagaaggaattatttttgataattttctcttagtgcaagagggagaatttcaagaaacagcaatcagaaattatttgttaaatcatccctatcctagtcgtaatcctgaccaaaatatagcagattttaaagctcaaattgctgctaatgaaaggggagtacaagaactgctaaaaatggttgagcaatatggactagaaactgttaaactttatatgcagtttgttcaagacaatgcagaagaatctgtgagaagagcaattgatgttttaaaagatggatcatttatttatgaaatggatagcggtgcaaaaattgaagttaatgtaaaaatcaacagagaaacccgcagtgccaagattgattttactggaacatctgcacaattaaatagtaatttcaatgcccccaaagctgtaactcaagcggcggttttatatgtctttagaactttggttgatgataatattcccctcaacgctggttgtctcaaacctttagaaattatcatccctcaaggttgtatgttaaacccaacttatcccgcagcagtagtagcaggaaatgtagaaacttcccaaacaattgttgatgctttatatggtgctttgggtgtgatggcagcttcccaaggaacaatgaataattttacttttggtaatcagaaatatcaatattatgaaactatttgcggtggttctggtgcaggaataaattttgatggtactgatggggttcatactcacatgactaactcccgcttaactgatcctgaagttttagaaactcgttatcctgtgcaagtggaaagttttggtttgcgttcccatagtggagggaaaggaaaatattgcgggggtgatggggtgatccgtcgtattaaatttttagaaccgatgactgctaatattctctctggccatcgtctggttcctcccttcggtttaaatggtgctgaagcgggaaaaataggacgcaactgggtacaaagacaaaatggcactgaggaaattttaggtagtaccgctaccgtagagatgcaaccaggggatatttttgtgatcgaaactccaggaggaggaggttgtggttaaatgaagctacacaggcaaaacctgcctacgcgggttatgttttccaccagtgtcagttcataaactgtcactctctacactggctatttggtgtcaaaagagatattcttatctgatgcaaggagtgataccatttcactcatgtttgttacaggttatcttaacagtgctttccctaatagcagtgtagaagatttaatcagttgcatactgtgaaatggtacaacgttatacgggggctgcctgagtaagcaaaaaggactcaggcgctttttcgtgtataaaaaaaatggtgatttttctggtatcaatttgttcgtttgtaatggtactggaaaagatgggaaaatacagggcagggtgcaaggagaaaaaagttagtgttttcctctctctatcaatagcggattagcggtttttgtggttaaatgataggtaggggttgctgagaaagtctttccgtgagggcataggagtcaggagtcaggagtcaggagtcaggaggagatttgaaaatttctttgccatctcttgaaatcccaaaaaatgcacactttttccggtatacccttcaaaacccttgcactaatttctgtgtttatcagcctctaacctttgatatatcaaggttttaggtttattcagcaaatgataggtaggaacagaaatcactgtgtcgttgctaaaggcagtgaaatatagatggatgcggaggatattaaacggcgctatgccgctggagagagatattttctatctgctcacttggttggaatcaagttgattgatgcttatttaccgggaatcaatttgtggggagcagatttaagtgatgctaatctcgctaaagctaaactttggggtgcaaatttgagtagggcaaatttagctgatgctaatttgactagggctaatttgtgtggtgttaatctctctgaagctaatcttcggggtgcgaggctgcactatactaagttatatggtgcgaatttgaagggcgcttgttatgatgacagcacgcgcttttctaagggttttgatcccgttagtcacggtatgcggaagttgtgaaactttggttttattgttggtgatggggataaattgggcgatcgcattctcttggatgataggagggcgatcgcacacaactttatttttattattggggtaaaaccttcttttagtgtcagttttatgattaattagttaatgtcctaaccaacctatccactgatataaaattttaacccaaaattcagcaattgagcaatccacttttgctagtttcaatccctaataagcattatttaatgttgcaataatttgttctaagattgtaattgaaatactacccaccctaaaagggtagagattctgggctaaacattagaaagacaacaatggcagctaaagataagtttcatactgtggtgagaagagctttagaaaaggaggagtggaagataactgatgatcccctacgactggaagttggcggaaccaaatttgaaattgatttaggtgcagagcaacttttggccgcagagcggggcaaagaaaaaattgcagttgagattaaaactttcctgagtgattcgccactaaccgattatcatgccgcattaggacaatttttgaattatcgacttgctttagaaatcagtgatccaactcgtattctctatttggcagtaccaataggtgtttatgaatctttttttaagcgggaatttgcccaaatttcaatagagagatatcagattaaacaaattatttatgacccaattgaagaggtaattttacaatggataccatagtatcttatcgcaatatcattcagtcgttgttgactgcttatgctgccatcccaatagccaatggtaagattgattgttacactgtttttgatactaaacaagatcattaccaagtcatgaatgttggatgggatggccatcggcgtgtctatggttgtgttttacatttggatattaaagagggaaaaatctggattgagcaaaatatgacggaaatgatggtggctgaagaacttgtagcgcgaggggttgcaaaggaagatattattttaggttttcaagctcctgaaatgcgggaatatacaggctatggagttgcttgattgtatcttcatcacaattacagcagtttcaaagaaattttcaaatctcctcctgattcctgactcctgactcctgactcctatgccctcacggaaagactttctcagcaacccctagatatatatagttttcaaggttcggaaaaacgttgaaaccaagacagggtaaggtgcgcgggtggttgttctacacaaataactcccaatccttgcagagagagagatccaggcatttttttcaacacctcaaaatttacacccacccatccgcgcatttcggactacaaactaaccttcctccgctgctggtaaaggaaaaacttccccagccaaataatcagaaaaatgcttctgaaaatataaccaagaagtcatatcttccccttctataaaagcattcggcgcttgcttatacaaaggcacacggttattaatttccgcttgtaacagtgggggtaactctgtaaaaccgcccaccttgccaccggtagcactatatataagttgtcctggttgttcacccatcttcatccaaggcaaccattgaccaattctatcccaacttaattttaattctgtaacggaattaagttctgagttgagcaaatctgcactcttgacagtaattttaaataactcagccgcttgataagttggagatgggcaatatggggcaaactggggatcttctgccaaagggttgggataatggggaaacagatcaaaaacaaaggtagtattttcaccttccacctgtacaggcagtttacctttaaacttaccttgtacgggattattagccacgtgcatcaccgtcacagtttccccagtccagggattttcccattttcgtaaaatttcatctgtttctgggttgaggtaataagtcagttccctagaagtaaaatcccaacgaccttccgcagtgggaatacaccgacttacactcataccgataattttaaataaaagttgtcgcttttccccagggacaaaactataaattttacctgtccaaactaaaaaagtagattcattagcatctaaggaagaacgagttttcacccattgttgggcatcaacttcttggatgtgggctaccatattctgtatattttctccttatgattatagtagggactggggactggtgattggggactggtgactggtgactggggaagaaaattttagattttatattttagattttagattggagttgacaaaaacaatccaaaattcaaaattcaaaatacataactcctgactcctgactcctgacctaactttttgctactaaagtccagaaataaccatctggggcaacaaaagaaaaactcatttctccaaattcattatttacaatattagtaaatttctgtacattacttgcccgaattttatcaaaataattgtgtattccttgcacccgataagtgtaaagacacattcctaaacttcctggttgagcaaatgtaaaatgtgattctaagggtatattttctggaaagcgtacaatataaagtctaccactgcgagcttccattaagttagtttgagaagaacggggatcatcaaaagcagtaactataaacttttcccctggatggaggtcaaaaaaatctcgtcctgcaaaagaagattcatagctggtttctatattatctcgcacacgcaacaaacccaaaacttcttcataaaaccgcagggtttctttactgtcgtcttgaactactaaccccaaatgggtaaattgactggtgctaaaaggtgcattgtgatttattttgccatagtagggcatgacataaccaaagcgttgaaataacacctgtcgcgtcaaaggttgcagcagtagcatttctctgactcctacggctggatcaacaaagggacggtttttgtattctttttgataaatgacttcccagtaagggtaagtatatctaattgtatgacctgcggctcttgcattttccccatgatttaaaatccctaataaatcagcggttaaagtcgtagtccagcgattacccttgattttcatggaactaatacccaaaccttgatttgtgggattttcccaaatcatcaatctgattaaaccatgatctgcatcttggtgattaagacgaattgcttttaaagaggagtttaccccatataattgatacgctgtttctgcgtttaattctcccactgatccaatgcgataaccaaattgttgccaatattgaattgctaaaatcggctctggaacgccaatacaaacttcatagataccttcaattgtcgtggtttttgcttgagtcatggttcaatcaatttaagtgtaaactgttagtgcataggcaaagtcgggaacagtggaaagccagcccggaaagcgaactaggtgcgatcgcttaaaaagttcaccaatttttggtcttttcctatgaagtgtcagcagtgagagaatatcaagtgcggaaatttccccaaaagtagactcacacttttatactatttgagagatgttcccacatctaaaactgtaaacttgatataaattagatataaattaggtataaattaggtataacctaaatatacattaggtataaattagatttttgatagatttttgatagatttttgatagatttttgaagaattacgcattttcctcaaggatgctttactatattgtataagttatgtcaaatcatgagcgatcgcttactacctctgattctgctttattaaatcaaatagtctctcaggtctgccaaaccataattactattcaacaacagcagccagaattattaatggaaaagtacagaaaagtccaatggcaaaaaacagctaatcaatctgctttgagtgctaaatttacagaattactcagtcaaactcgcagtaggaaagaactaataaataagctacaactatatttaaaagctttcctagttcccgcagctttaaatgtaccaatcatatcagaattaattgctgaaattagaaatcacaatcctgttatatctgatttaaatagctgtttaaattctacattgtttcctgctttagtaccagtaggaataggggttttacttttagatgcggaaaatttacaacttaatatcaatacagaaaaatttttaggaactatttgtcaatgtcctattcaagtgaaaattgcctttgctaattggagtaatcggggtaaactagatgtagaattacatgaacgtggctatgatttgattcatgttcctgctggtagggataatgcagatggaaaaatgattgcttttggttcttctattcatgaactttatcccaaagctaaagaagtttttgtttgttcatctgataaggtaatgactaatttatgcaaccatttacagcaacatgggttaacagtatatcaagtcagtcagcacggggaaaatatcaatatcttcaataatgccacaggtgaaactattatcaatagcattaaacccttaccagaaataccatctattgatcaatttgttctgcaagttaaacatttaattaaagaagaacaaaagcaaacagctaattattggattaaactctctcaaatttctaaattatataaaacgaaatatcaagtaaatattagtaatgtcattgctaaatatttaccaggtaaacgagcgagagatatttttattagctatccagcagattttgtaattcatcaagttgatgatgtaggagaattatacatcacgctttttgaacaacaacatttttcccaaaaagaagatattaatccagcagaaaataataaaaactctcaggttaaaaataactcattagtgaatagtttaaccaccaaattagatttagaaaaggccataaaaaatattttgtcagagttaagcaaagaatctaaaaatgaaagttgtgatattagtattttagccagtaaatttaagcaaaaatatggtaaaccgattactgaacaaatgaaagagttacaaataggtggtacatttgccaagtttttacaatcttgtagtgattttcaagttcaactcaaagataataaatggcaaataagtaaactggattctcccagccctgcatctgtgttatcatctgtttcatcaactaagatcaattctgctgctgacttagaaaaagcactaaaaatgattctcacagagttaacgaaaacagcaaacaacaactatgttgatattgggattttaggcattaaatttcatcaacaatatggtaaacccatcactaagcaaatgaaagagttacagattaatggtagttttatcaaatttttacagtcttgtagttctttccagatccagcagaaaggaaataaatttaaaatagtaccatctgtcaccatgacatcaggataagtatattagacctctccgaaaaagatgtagggacaattcatgaattgtctctaccaaggttttcaaattacgcatatttaattttcggagatatctaataagtttttgaatactactagaacgtcgattcagtaatgctaggtaatctgtttttaccttgtaggggggaagcattcggacagaatatcaatggtttcagtgataggttatcacccgaatgcttcgcccttacgattaatgaatcggtgttctagagggtttaggcttttgtaaggatgtatgctaaaataaagccaagtttagttgcttttttcacaaatactatttatggagattgaaaaaatgctaaacaatcaatctattaccgaaatgactttacaagatttagaatcattgattgatagaattgttgatcaaaaaattaatcagattaatgttgctaaaaacaacatggagaaaaatattgtcgcatcattgacaactgatgctgctataagtgtcggtgaagaaattttagaagattttcatccattagttcaatctgatggtatttttaaagacgatcctttctttgatgattttgttgaagaaatggctaaaaatcgccgtgaattacatggagaaataggtgaaaatgacgaataaaactgatattcttgattttgaaaatcaaatgtccactaaactaatctcaagtataaaggtgaaattatgcaactagaagattattttgaatttttagacccagatgatatccgtattaagggacatagaatcggtattgatcatgtgattgattattacttgcaagggtttacacctgaacaaattctggaagagttgccgtcactgaatttagaaaaaattcatgctactattacatactatctccataatcgtgcggaaatagatgcttatatgttgcggttggctaggtggagggaacagcgttatcaagaagctgctgctaatccctctccaatgatacagcttttgagagcaatcaaggcttaaagtcatgatgaaacgattgtaactgagtcaatcttagcaattcctggtaagatgataacgattagattaatttttgtaacacaatatactggttttcaggaaatattggtattataccgtaataaaattaatttattcagctttccataggttttatagcttaaaaatgtacttataattttaaacaatatatttttaacataacattaaatataaatccaagcaaactaacaacaggactaagtattaaaaatggctaaaatgtttcctccagacggtccatgtaatcctgatttatatggagaaaagatagtatatggtctactttctcaacttgacgataacttttatattttccaagatagatattgggttttcaaaaacaaatataaatgtagaacagagaccgaaacagattttttattagttcatccccagaagggtcttttaattcttgaagttaagggaggaactagattttcctatgatggcgaaaatgataaatggaaatctggtgatgatatttcttataagaatccatatacaaaacaattagctaattctaaaaagttacctttatttttaaaagaaaaaatacctagcttaaaaaataaatggtttaattgtggatatgcaatttgttttcctcatattgatatattagaaggtaacttagctccctttatggagaaagaagtgacattatttagatatgatctaaataatttaagtatgaaaattaatgaaatatataaatatcatagccttccttctcataaacctcttggaaagagagtagtagaatcaatcaaagatttaattagtcctcaaattgagttcaaaaaatctcttagtgcagaattagaagatgagcaagaaaaaattattcgtcttactaaggaacagcaaaaaattttagatggtttttattataaagctaatcaacctattctgattgaaggacctgctggaactggaaaaacacaacttgcaatatctcaagcaatatcggatatcaaagcagatacatttgttctatttattacaagttcccaagaattaaaaaattatattagttatgagatttctctgcatataaatataaatacaagtaataaatatttacaaatcttaactattcaggaaatgaatttatttccaaatattttagatggtaaaattaatgaggaatatgcagaaattagaattattattgatgaagcacaacaattggaagtaaaatttttaagagaaatagctgaatatacacaagatatatcaatcatttccatactaatgtttaaagatgattctcaaaaaactaaggaaaatgagatacaacaaatatttagaccatttcagtacactttacaacaaatcataagaaatacagctgagatttttgattcttacaaagaatacatcagtccaagttataagaaaattcaaagaccacgaagacatttcaaggaagttattacagaatattatactaatgatgaagaaatgattaatattgttgtacaattaattttgaggatgataactgtagataaagttatacctaagaacataacaatactattttctaatataccaaatgatgagattttagaagcaactaatttattactacagaaagaacagcttgttttgaaaaaatttgatttatccagtaatgataatactaataaagccaaattaattacctggtcaactcggcatgattttcaagggcttgaaaatcatataattgtattagttgaattagaacctgcaacttctgaaactattgttgtaaggagattaagatatatcggtagatcaagggcttgtagtatattatatctcttactaagaaaagatgtagattcaaatatcgaaaatattgctgatatattttagttataatctaaaatatctacccctattttatcttgactattagacaattctgtaaaatcaaaataatcaaaaaagttgaagctatttttttgttcaagtattgatgataaaattcttgaaatattatgcgaaatgggtctagatatataattattgatgttatttctaaataaatcctcatcaaaatacttaccattatctctgtgagataatatccatatcgcatataaagcgttaagattcaagtctattgatttagtagataggaaactttgaaatataataatcaatttttcacaaagtttttgattattcttcaccatcattagtatataaggaggatctttttttctaggtttaactaaattatgaattaatcttgtcctagcataatgtataatatttgggtttttaaaaacctcattcattgctttataacctgcaataataacatcactggtatatccaaaatttataatttttacaatactccaagtattttttctaattgttttaggatattcttgaattatttctggaatttttgatattaaatttataactaaatcttcatcatattcgtcaaaattacttaaatcgaataagtaggatgttactgtataactatcttcttgatttaaagtagaatttaaattaatttttttaaaatcttccgatctttgctcaaaattgatattatttaaatcatttttcacacttaatatctcttcatttaagtgatcaggtaacgaaatttcatgatcttttctaaatagctcttctacagatttaggattttgaataatttctgttttagtagagtttaaatttaagcctattctatgcaattcttcctgaagaatattaacggctctaattgcctcttgttttgtatttgtaactattttaatatcatcaacatatctggcataattaaagttatgagaaatcattaattcatctaattgactaagtaatatattggcgagatatccttctgtgctattaccaattaataaaccttgttgttttttctctgattttagtgaactatccactacagaatagaactcaacttctggtcgtaaaatttgacgcaacaaaggttcatatttttggggtagtatattacctactaaattaaaaattgaattaactaagtaatcatgagatattgcatcgtaaaatgatgttatatcagcttttaaaacataagaatctttttcctctttattatattttataattaaatcctcagcccattctataaattgtttgtgttgaggataatattcccgaaataaatatataaatccacttttagaccgttgggttctattagcaaaacttgttttaataaaggagttttcaactgctagtgcaagggtatttacaagatgatatctaactgctaattctttaaatggaatatatatacatcttctcaagaaaaagtcattcttgggataagaataagcaaatgatctatcttgtatataaggttgtgatagtgagtaaatattatggatatattcaactaattgattaattttagtatcatttttgcagttaatatgtaattcaaaaaagttacaaacatgatcatcatttaatctgctataaatagaataataaatagagtttcttattaattttaaatcagtcagataatcttctaaattaaatttaatcataattaaacatcaaattaatttttcaacctatacaaattataatttttttctatttttcgtaaatgaaggacaaagcctaaaaacttcatccttcacccctatttaattacgcttcatccaaagctgcaataccaggtaaaaccttaccttccaacaactccaaactagcaccaccaccggtagaaatgtggctcatttgatcagccaaaccaaccttttccacagccgctacagagtcaccaccaccgataatggtagttgtgccggttttgccgatttctgctaaagtatgagcgatcgcctcagtacccacagcaaatttatcaaactcaaacacacccattggaccattccaaatcacagtcttacaatccgctaaagcctcttggaaaaccttcacagaatcaggaccaatatctaaacccatccaaccatcagggattgcttcaatgctgacggtttgagagttagcatcagcagcaaagttatctgctaacaccacatcggtgggtaatagcaaagctacaccacgttctttagctttcgcttccaaagacttcgccaactctaacttatcttcttccaccaaggacttaccaacacttaaaccacgggctttgtagaatgtaaagatcattcccccaccgatgatcaacttatcgcacttttccaacaaagtttcaatcacaccaattttgctggaaaccttagaaccaccgataatagcagccaaaggacgttgaggaacttcaattgcactttgtaaatattgcaactccttctccaccaaataaccagctacggaagggcttaaatacttagttacaccttcagtagaagcatgggcgcggtgtgcagtaccaaaagcatcatttacataaaaatcagcgtttgctgccaatttttgagcaaattcggggtcgttcttttcttcttccttgtaaaagcggacgttttctaataacagcacttggccattttccaaagctgcaaccttagcagctacatcatcaccgatgcagtcatcagttttgaccacttcttgtcccaacaactcagaaagacgtttagcgacgggagttaaacgcaatttatcatctacacccttgggacgaccgaaatggcttgttaaaatgaccttagcacccttttgggtcaaatcttggatagttggtagcgctgcccgaatccgagtatcatcggtaatgttgccttgatcatcaacaggcacgttaaaatcaacccgtaccaaagcacgttttccagaaatatcagcagcagataaacttgctaaactttttttcgacacagccaaattctcctgattatctttttgttattgtttggaaagtatcaccatccagattttaccggagtaaggggtgtgaagattaatttatgtttaaaacagttctatttcccattgaccaaagtcgtgaagcgcgagaagccgctgacgtagttaccaacatcgtgcagaaatacaacagtcgtttggtattgctgtcagtagtggaagaaccctccccaaatggagatgctggcaatatcatgggttctccagaggtagttgctaaactcctagaaaatgcccaaaccttattttctcagcaaggtattacggctgaagtattagaaagacagggtaaacccgcttttactatctgtgatgttgctgacgagataggagcagatttaattattatgggttttcgcggactgggtttaactgatgaaggcgcaaatgatagtgtcacaaccagggtgatcaatctttcaccttgtcctgttttgattgtgccttagatcagggaacaggtaatgggtaatgggtaatgggtaatattattcccagtccccagtcaccagtccccagt

SEQ ID NO: 97 - DNA, 14529 bp, Sphaerospermopsis sp. LEGE 00249
  LEGE00249_115
actaacacgaataactttcttccttaacatgatctcgacctcaatactataatcatagcataccacgaggagatttgtggaggttttaccagaaatgtttaggtatatagcctacagtcccaaccccgctaatttctccatactttgttgaatttctaactccaacttagctaaattagccagtatctcctggggtggtaaatggtctacctcctcatgtaccacttccttgtaacgattaagacttaaatcatacccttgagccgcaatatccgcccttgggacacagaaagtttgagcggtgcgggggcgttctcgttctgtagtattacgtacctgccaccgtgctaaaatatcaggtaaattatttttactatgttcctccggggttaactgcacagccggcacagatccaagtttatcctcagttaacaaaggtgttcttttatcgtctaaactcaatccatcggcattgacatcatagaaccaaacaaaatcagttcctcccgaattggttttagtaaagagtaaaatcgccgtagaaactcccgcatagggcttaaacacaccaccagggagggatatgaccccatctagcttttgttcctctaccagtattttccgcaattctttatgtgctttagaagacccaaacagcaccccatcggggacaattaccgccgccctaccccctggtttcagcaatcttaaaaataaagctaaaaataataactctgttttcttagttttaactatttctaataaatccttggctgtgttttcatagtctaaagaaccagcaaaagggggattagccaataataaagtataggtttcctcatcatctgcgtgttcctgtgctaaggaatctttatatctaacatcaggattttctacaccatgcaggagcatattcatactgccaattcgcagcatggtattatcaaaatcaaacccgtgaaacatctgctggtgaaaatgtgcttttagcttgacatctgttaacacctgggggtgatgttgacgtaagtattcattagcagtcactaaaaagccacaggttccactagcagggtcacaaattacatcccccggtttgggtgctgtcagttccaccattagcccaataatatggcgcggtgttctaaattgcccattttgtccggctgaggcaattttacttaacatatattcatacaggtcgcctttggtgtccctgtcatccattgggatattagcgatcaagtccactactttagcaagtagcgcgggggtgggaatggtaaaacgagcatctttcatgtggtgggcataggtcgagtcatcaccacctaaagtccgcagaaacgggaagacaaattcattcaccacagcatacatttctggcggtgcgaaatgctgaaaccgcgaccaacgcaaatgatcataggggcgtttttttagcggttctcccgactcggatttttctaatacataatctccctctgggaaaatacgccgttccattggctttttgagtcgggtagctttgttttctgctaaggtatgcaggtcatccagacgacgcaaaaataacaggtaggtaatttgttcaattacttctagggggttggaaataccaccagaccaaaaagcatcccaaattttatctacttgacttttaatttcccctgatatcatgttttatgtttatccagtaattaataagtacgcaagcaaaattaattgtaattgcacatagttattgaagaaaaaatctctgtaaaccttacctgttccttctcctaacctgaataattaatacaagcaagatgcttgtgttactgtaacttcaggttttttgattatatagtttagccggacatcagcttataaagtaagcgatcgcccagttttttctgaatttaaaatatattaaaatatattaaaatatattaaaatatattaaaatatattaaaatatataaagggtaaaggttaaaggtttttcttcaccttttccctttaccccattaacggaataacttgacactccccacgtctaaagccgggggattcttgaagagtccataaactgactttcaatggtgctggcaaaaacaccctacacgctcaaaacaactaccaggacaaaaggtattgcaattgcgcttactttttttgctttggtgagtccatcacaatgccagttaggtacgctcaacatcctgccattatttgccctttaactattccaaatcaagttggatatgtccgttgccgggatttctccgcactaggatgtttcttcacgtagatggtttttttactcactttttcactattataccactgtggctaaagccagtcaatcgttttaatgcgactaaggtcgctatcgacttatccccatgtctaaaagtcaggggcttgcgtctcgtttcagggtcattggtatttagtcattggtcattggtttatattcacctattcccaattacccattaccaattacctaattatgcagcgtcagttacttttaaatctctgagggcgttgatatcaactttaattgaaggacccattgtagcagagacgtagaatgtacgccaataacggccttttgctcctgaaggacggttacggtcaattgtctcttgcaatgctttgaggttgactaacaaatcttcaggggtaaatgatgctttaccaaacataacatgaacaatgcctgtccgatcagcacgaaattctaatttaccagctttaaattcggcgatcgcactggcaacgtcaaatgttactgtaccacctttgggtgatggcatcaagccacgaggaccaagcaatttacccagttttgctacctgtggcatcacatcaggagtagcaatgagtttgtcaaagtccatcatgcctttctgaatctcgtcaatcagttcttctgaaccagcgatatccgcaccagcattagtggcttctgttactttttcgcctctggcgattactgctacacgcactacctgacccgtacctttgggcagtgctaccgttgtccgcagttgttggtctgtatacttggggtcaatccctagccggatatgcgcttctgcggcttcgggaaattttgctgttgctgtttcttttaacagagctaacgcatctaagggcgcgtaatccctatcttctactttttctaacaacgcctgtaaacggcgtgatattttcttgcccattttttgctcctggggtattctcgaagtttctcacttctcccccgatacaattttagattttagattttggattttagattttgttataggtcggctgctagttatcaggttttatgactcttttttactgtcacctgtcacctgtcacctgtcacctattaatctgtgatggtaacacccatgtttttggctgttccagcgacaatattcattgctgcatcaatgtcgttagcattgagatcaggcagtttagtttgggcgatttcccgtaactgcgctttggtaatactgccaacttttttcttgttgggctgttcagaaccgcgttcaattttcgctgccttgcgaattaaaactgatgctgggggtgttttgagtacaaatgtaaaactccggtcttcaaacacggaaatttctacaggaatcaccattccagcttggtctgctgttttagcgttgtactctttgcagaacatcatgatgttaacaccatgttgacccagtgcgggaccaactggtggtgctgggttggcttttccagcgtttaaggccaatttaatgaccgctactactttcttcgccatttggatttagctctgtttttgtacctgattaaattccaattctactggtgtatctcgtccgaaaatcgagagtagagcttttagtttactccgttctggcgaaacttcgatcacctcgccttcaaaatccttgaacggaccagaaagcaccattatcttatcacctgtagccatatcaattttgactactggttcttgttctgtcgtttgtttgaatatacgttctacttctgaatgacttaaaggtactggcttgacgtgaccacggccacggccgctgcctcgtttttgctctgcaccgacaaagttaattacatgggttgtgtttcttaccacttgccatgtatcatcactcattaccatccgaactaaaacataacccggaaaaaccttctcttctgatggctgacgtttcccgtctttgcggatctttaccgttggtgtatggggtatttccacttggataattttatcagctacatcaaaagtttggatacgttgctctaaatttgttttcacgcgcttttcacagccagaggctacttgcactgcataccagcgggcttctttgtgcgctgtttctagtgcttcctctgtctgcaaatcccgtggttcgtctgttgcagaagtcatcagaatacctgttttgctgcccaagcaaacaatccatcgaccaaatatatcaaagacgcggaaagtgtcaccattaataacacagctgctgattcacttaccaactgcttccgacttggccaaactactttgtccagttcttcttttgttccttggaagaagttgtttaagctaaaaccattgcctgcttctggcatttctgcttcgttttttttggccacggtcgttataccccccgtttcttacatcgtttcaccttgttattttgcaccaaggctgacaattattcacagcttcgacccaatttacagtaaacaaattcagctatcagtaaaaaataattagacccgaaataatcaacgctggctgctactgtagcagatgcgtttttgtttcgggctatattttttgcttttgagcgcgccctggaggacttgaacccccgacatcaggttttggagacctgcgttctaccaactgaactaagagcgcacaagctatctttgtttcagggattgcgctgaactttttttagtttaacacaattccttttttagtgtaacttaattttttcagaaagtcaagtcagcggcagatgccgcttttggcttgagtttcctggttttttcccaggactaactgcatcacagggcgcggtcaaaccgttgtttaatccgggtagctttaccagataattgacgcaaatagtatagtttagcgcgtctgactttaccacgacgcactactttgatgttatcaatgcggggtgagtgcagcaaaaatactcgctcaacgcctacaccttgaaatacacgacgcacggtaattgtttcgttaattccgccattgcgtttacctattaccactccctcgtatggttggactcggtatttatcgccttctttaattttcactcctacccgcactgtatcacctacataaatttcgggtagatcggattttaggtgttccgcttcaatagagcggattacttcttgcacgttcatattctagttattttttgaaaaaaacccacgatcatcaatcataaatctataactgcctgatagtccagatatttggtgtaatttcccaggcagaagttctgggatgtaggagagtgttaagctttcttgaaattttttttccagatccgcaacttgataaatactggttttgcccaactgccaccaattaaatcatgcaatagagtgtaaaaacaaggaataataaacaaggtcagcagtgttgctaaagacaagccggaaaagactactacacctaatggttgcagaaattctgaaccttccccaactcctaaagctaggggaaacatccctaaaactgtggtaattgttgtcattaaaatcggacgtaaacgttgaggtgcagcttttaaaattgcggtgcgacgatcaacttgttcgcgttcccgaatttgatttgctaattctaccatgataatggcgttatttaccacaatacctactaataaaactgcacccacaattactgttgcaccaatggcagtttcggtgatgtaaagtccaaaaatccccccagctaaagcaagaggaatagtaaacagaattactaaaggatcaacaagagaattatattgtacagccatcactacaaaaactaaaaatattgctaaccctcctagaagttgcaacgagttttgtaattgttgatttgattctgctgctgcactgggtaaaggacttacaccttcagggaaattggcatttttaattactgcatctacttgctctaatgcttgacccagacttgctccttctgctaaattacctgcaattaaaaagacttgacgctggttaattctttgaatttctccgggtgcttttccttcaacaattgtcgctacatcactcaatctaatttgttgattaccttctacaaataagggtaatctttctagctgagaagttgttttgactgcttcttcatttaactctactcgcacatctatcaagcggttattgcgttgtaattgggtgggtacagtacctgtaattgcggttttaattgtttcgccaatatcttgagtatttaaacccacattggccactcgttcccagtcaggtacaatctgaatttcaggttgacgtggatctgcatctggacggaatctgactgaagtaattttctcgtctaaagttgctaatagttctcgtcctgctttttctaaagtattggtatcatttccctgcaaaattatatcaacatcagcaccacgaataggagagttattaagaaataaaccccgcactcttccaggtgctaaacgcagtcgaatatctactaaattcagtttgctaagttctttggtgacacgctcaatataagtctctatatctgagtttggtttgagggtaatggtactagaacttcgcaaaggattaggattactattaccaccaaacagaaaaccaccaactgtagaaaagacatattctgtttctggttgctgacgcaaaatgtcatctacaacttgcataactttttggttagtttctaatggtgtaccggggggaaattgagcaaataaactagcttgtccggtgtttatttgaggaagaatttcttggggaatttggggagacatccacacactaccagcaccaaagaaaatgatagcgatcgcaattgttaataaccgccaacgcaatattccagataggaaactgctatataattttgttgctccatcaaaacgacgattaaattcttggaaaaaccaaaaattatttaaagaactagaaaagggtaaagctaataatcgtgatgtcaacatgggaacaacagtaacagcaattaaaattgaagctgctactgcaaaactaatcgtgagaattaattcattaaatagtaatgatataaaaccccctatcagcaaaaatggtaagactgcaactaagtttgtactggtagaagcaagtaaagctgattcaacttctcgactacttttttctgcttgttgaataattgctgatgttgataatttcgatgtgtgattttggaacttagtttgattaattcctgcggcaatattttctaacatgacgatggaattatcaactacaattcccactcctaatgctaaaccacctaagctaaaaatattcagggataagccgaacattcccatcataataatagctgctaatgtggctaaaggtatagatagaacaataatgaatgtttgccgtaaagaaccaagaaacagtaatacagcgatcgctgctaaacctgaaccaattaaaccagaagaagtcacattagctaaggaattacgaataaatattgactcatctaaagttcctgtgagagttgcttccgcaggaataacacccgcttctttcagttcttgtaatctttttttaactccatcaacaacgttgacagtattagcatctgcttgtttttgaatgctgacttttactgcttcttgaccattgagtaaaacgtacaatctttgtttttctgatccgtcaataacttgggcaaagtcacgcaaataaacacgatttttgatatttgaattaggtgcagatacttcaaaggaaatattattaatttcttctgcatttttgaagcgtcccactgtccgggttaacggttcagaattggctcctaaaattcttcccccagatatatcttgattacgattttgcagttcgtttaacacatcagtcaaaccgacaccaatagcttggagacgatctaaatctatatttactctaacttcttcttgcactcctcctgatacatctacaactgcaactcctggtactacacctaattcacgggctaattcttcttcggcaaaaacgcgcaaatcaacatttttcagtgtaggtgaagtgagcgcaaattcataaacaggtagttgggaagggtcgaatttaaagattcgtggttcttctatgctgtctggtaatctatttctcgctcggttaaaagtagcggtagcatcatttagtgcttgatcaatatttccccctggttgaaaatataaatttaaactgacttgaccttcacgagtctgggaaaaaacttgaattactccttctgtggctgaaaaagcttcttctagtggttttgtaatttcatcaactgctacttctggagaaattcccggtgcttctattatcacaccaatacgaggataggtaatagatggcagtaaatctacaggtaaacgaataatgaaaaataaaccaatgacaattactgctaaggtcagcatcaatgtaccaatatgctgacggatagaaatggcgctgatactaaagcctttgttgtttgtgatttgcatctttatagcaggtgataggtgacaggtgacaggtgaaaggtgacagagttgaaactgctaaaaaaatttacaagttctttctttgcggtttgtttaaatctttttctgacaaaattgataatttgacaacttcaccatcttttaatggcttactactgcgaacaatataactttctcctggttgtaaccctgaaagaatttcgacgttaccatcaacttttttacccaatgttaccgatttttcttttaccttggttttaccgtcagtttcttgaacaacaaaaattgtgccgttgttcatttctgctgatgtttctttgtctttgctattaattgctgtttgtgatactactactcgctgtggtgtctgggttgtaaaattcattcttgttagtagtccgctacctattttcccgccactgttgggaatgactacttctatgggtactaaacgggctgtaggatcagcagatggagaaatacgcgctactctaccaatgatgttttgatcggggaaggcatctaaacgcacttgtacagattgccctacttgaatttttgctagttctaattcagaaacttgaactactactttaattcgacttaaatcagcaatttttaagacttcgcttcctggttgtaggagattaccgggttctgtgactttttctgtaactacgccggtgatgggggagattaaacgggagtaggaacggcgttctttggcggctttgactactgcttgttgggcaaatactctaccttgggcggctgctacggcttgtttttctgtacggactctttcaatagtggcttgtagggctttttgggttgtttgggctttggtgcgagcttgttgggctgcttgttcggaaattgctccttctttgaataattgttgctgtctttgggagtctgattgggcttggatgagttctaactttgctttttctacttccgtttgagcgttacttacttgggtcattgccctggctacttctgattggctggttgctagttctgcttctgcttgctgtaatgctgtgatcaatagaacatcatctaactggccgatgatttgcccttgtttgactgtatcaccaacatccatatttaaggatatcagtcttccttctacttgcgatcgcactgatactgtccgatatggggtggtgttaccaatatagtccgctgggggacgcagttcttgtgtgcgggcgatcgctatatctacagatgtttctctatttgctctttctccaccaccagtccgctgcgattgggcttctgctgattcttttggtaatgaaccacaactggttgttagtaatcccagtaacagcagacagaatatgaataaattatgcttattcattagcttattgatcactgggctgacaactataggagttgatgttttcacctgtttttgtgacttatttgggtccaaaaccatgaatttttctccacttgggcagtatttgcactcttacagccatttattagccaatactttggaataggtatgaataatcaaaaatagcaatcaaaattcagctatttatttatgtattccaaataactttttttcctcaataaaactgacagaattttcaccatatcctatggatattgatgtatagaattgctgacaatcatagaaattataaagttagtataaagattttgccaccaataagtaataggaaattagtcatgatttattcctgggagtttttcattacccagccatttatgaaaaatgtgccaaacgaactggtatttttcaggtttttgtgtatatattaagaatattaaacaaagcttgcttttatatcccagatagaatatcgcaggtgcaaccaccaaagcaacacattgacttttaggtgaggaaagtaacaagtgacattactgctgaaaattgccctaactgctgatgaacagcaaattgctgagtttttccaagcttctgtaggtgaatggcgctctgaaagacgctattacactttaccccaaggagaaaccaaggaaatggtaagtattattaccattcattttttgcaacaaggggatgatgaattgcaaaagctggctcagttacatgatttgcaggatttagaaagcttaacttgtggtgcaaaagttacttgggaaagtacagatttacacaacgctaaaaaagaagctagtggtgtgactgtgtttggtgcttggggaaatattttgtatcgcgatcgcggttttgccactactaaaccagtcacagcacaatattatttccccagtctgaaaactctgtgtttgcgaactgagtacaataattctgtatttgaggaagaaattaaactcatcggtgataaatatcgcacccgacaaagtattgtttcccgtgctggtgagcagttgatgattgggcaatacttggaaaagcgagtttaaactaattgatttgttgtaggcttgatgatgtcgggagcatcccaaatgtgtaagtttatttttatctaacaacagacaattatcccagggtctgatatgattgaaccgcaaaggacgcaaaggacacaaaggcaagagagtgtaagagagttttcgcagtggccacgtttattttttctttcattgggatgctcccggtgatgtcaaggattgtagtcaggattttcttgataaccatcagttatcagcttgaatgactagcctctacccaaacttaaacggctgacaaaggttttgataaaatttatgaaatttttgtaaagtcttactccaaaaacttgatttatgtgtaataatagtggagagagttaattcggcgattagcgttttgttgttagtattgacaggctttttacttgtggtatttacagactgctctccgaaatctaaatctctacaaactcgtgattttggagacataatatgtcagtttacgtaggcaatctttcttatgaagttacacaggaagctttgacatctgtatttgcagaatatggtactgtaaagcgtgtacaaatccccactgaccgggaaacaggccgtttacgtggctttgctttcgtagaaatgggttcagatgcggaagaaacagcagctattgaagcacttgatggtgctgagtggatgggtcgtggcttaaaagtaaataaagctagacctaaagaagaccgcggtggtggttacggtggtggtggtcgtggtggttacggtggtggcggcggtggtcgcaatcgctactaagtctaccctaaattcttaattcgttttaaataaaattaacccattccgactccggggtgggttgttttttggtttttcggtttttaactaacatactaaacctgaagtgactcaagaggaaaattctatgtttggattaggatggccggaagtagtaattattgccatagttgcaattttgatttttggacccaagaaaattcctgagttggggggagtattgggaaagagtttgagaaatttccaagagggaattaaaaagactgatgaagatgataattcagaacaatcataattgtctgaatcaggatttccaggattttaggatttacaggatgaggattttgataaatccctgatttcctcataatagaagtaatcagggatattatatcattgattttgctgcaattctgcatcaattaacttttgaaattcctccaaagaattaacactaatacttgctaacaggagattttctagaatagtcatatcctcaattttcttgagagaatcgctcatcaattcgggaacattattaaatctattggacagaattttgataatattgttttggcagttttttctagcacctttggcttcacctcgttcttctgccatttcttcaataggactgataaaaggcatatttaactccttttcatgttgttctaatttctggttgaatgtagtttgtaatggtggtggtaaagtcatcattttatcaatgaacttaactaaattgataatatcaaatctagttaaacccttttgatataatggtctgactatgttccatttccattgttctcgttgcgtgaagtctttagtcgtggctttggttttcagatgtgccatgactattatagcaaacaaattgttactggtggttagttcttcccattgatagtctaatagtttcacaatactaaattgcatttttacgaaactatcatctatgccatattcataattatttggtcgccattttgcgtcttcatcccctaaaattgctaaactaataactggtttatgaaataagtcaaaggaacgatagttatagatgtacattctttgggtaaattctttgtcatattgactttgtacctctatgtggatcaaaatccagatgatttcattgtttaataaccacacttgaaacaatttatccgcatagcgttttttagtttgactagatgcggtaatttgttctagttctttatctaaggagatgggggtttgactccaatcaattttttcgtggaggttggggtaaaagaattggataaatgattcaaaatattgggtgattgcttctttccatgtttgatcatagttggcggttgtttctgtcattcttgcccctgttaatgttattgtctgaatcagaatgtctggttactgagcgacttgtactgagcgcagtcgaagtaagtcgaagtacaggatttaaggattttcaggatgtgattttttgtctgaatcaggatgtccaggatttaaggattttcaggatgtgattgttaaatagtaaattacactagattctagtcggttttaaccgactttagctttaagacagggaatttattacctagctcatggattgcataagtatgtcagaatcaggatttacaggatgtgattgtcaaatattccctcagtaaattatactagattatagtcggttttaaccgactttggctttgagacagggaatttattccctggattcctttacatttaaaaaatcaactatgattaataatcatgatatccaatctttaattaacaaagctgacgatttactgaagaatcgagacagtaaacaagctattgccattattcaacaagttttagaagttgaaccagataatattgaggctttgaaaatttatgctgaatctctagtaaaactaaataaagtagaagaagcattaaccatttttgaaaaagctctacaaattgaaccaaatcatgttagtattctgagaaattatggaagtgctttatttcaggttgctaattatgataaagcattaaatattcttgacaaggctttacaaattgaaccaaataatttaaaggtattaagtacatatagtaaagttttattgaaattaaaatgttacgaaaaagcttttgtactttttgagcaatctttacaacttgaaactaataacataataactttaaatagctatggtaaagccttagctgagtcgggaaattatgaaaaagcttgtgatatttttgagaggtctttaaatattaatcctgataatataatagcattaactagctatggtaaagccttagctgagtcgggaaattatgaaaaagcttgtgatatttttgagaggtctttaaaaattaatcctgatgatataatagcattaactagctatggtaaagccttagctgagtcgggaaattatgaaaaagcttgtgatatttttgagaggtctttaaatattaatcctgataatataatagcattaactagctatgg

SEQ ID NO: 98 - DNA, 14448 bp, Sphaerospermopsis sp. LEGE 00249
  LEGE00249_116
taaactagctaacagcagcagcagcatagaaccaatacccaacggtgacagtaaactgtccttgagacttcgcagcagtggttcactgggttctaaatcatcatctgggtgtttgggagtatgatttgccgctacaggagtttcaccttcagccttgggctttgtcggtactatactactgataggctttgactcaggtggcggtggtggggtttgtattttggtagactgttcggcagaagacagtggtaaatgattgatttgttcctgtttttccacatctgagacaggattttctagaaaaattgagttattcttaaattctgacgttgatggctgagttgttaccaatgtctcagttatggtatttaactcttgggatggctgaggaatataattttctacactaacttttttcgtttgcctcactccattgcgtgcgcgtcggtatctagttaactcttgatccaactgcacttctaaacttcctagtgctgctgctagtgctggttgtaagccagaggttttagcggatgaagtaccagaatcaattgtgggattttgactcattgccaggatgccttcaatatgatggtgctgtatgaattttatcagtaaaaaattcaagtgactcctgtacgggtgaagtaggggcgaagtaggggcgaagcattcggaaaataacctgtgatcaaaattgagaattgatcgcccgaatgcttcgccctgacaggaaaatagcgtgttgataaaattgataatttgttgcccgaatgcttcgccctgacaggaaaatagcgtgttgataaaattgataattttgttgcccgaatgcttcgcccctacgactcctgacttcttaatctcctagcccatgacttacgtcacgctgcgggaacacagataactttttcagcaaacccaaatctagatgtcgttgaaatctgttaatgatattttaggcattctccaactggaagcccaatggcaggaacaacctttttcacgcttgctcaagtgttggcaagaagttgttggggttaaggttgctgcacaaacacgccctttgtcgattcagcgtgatgttttgtgggtagcaacttctagtgcagcttgggcgcaaaatttgacttttcaacgcaaaaatctacttttaaagttaaataaaaagttgaatcacgagatattgacacctttgatagatattcgcttttctactgcccaatggaaacaaacaccattaccagacaacccacaacaaactttatcaccccaagcacaccctagttatttgggtgatgtaggtgtgggtatttccaaacctgaacttaaagctagtgctaaaaatgctcagacagcttttgaacaatgggctagaaatagacaagagcgatcgcataacttaaacttacctctttgcccccaatgtcaatgcccatccccaccaggtgaagtccaacgctggggtgtttgttctccttgtgccgctaaatttgtcattgatcaagcaggaaacaaagaatagccaaaatgcaacatctaaaaggctcgtgtcatccaaatctcactctttacctttgatccccaatgcgttataggcaaaaacaagtatgtggacacttcactaatcatatacaaatatgacaaaaatataaaaacataataaaaatttttttttcaaaaaaatacctaaaacccttattagataattacttcttggcttttatacccattttgtcagggaacgaaaatattaagtgtgataattacccttccttcccactcaagactcaagattatgaagccaattaaccctttaacatcagcctgtaggtattgtcgtcattaccaaccagaaggccgtcgtggtggtatgtgtcagcaattaaacgcacctgttcaagctggttggaaagcttgctctttagcgatccccgcctttgctcctacatgggaatctttagaagataattggagcttaccattatctaaacctattgtacctatcctacccgttgcagctaatatcaattccgatttagaaaatctagaatttacaactgttgctgaaacatctgtttcctcattaccagagataaaaactaaagttatagctgtttaagacttggttactacttttggtgactactctaattatatttttccccatcagactgctaaatataacattggcatttagttagctttgcaaattttttggtgctgcaattttgtttttaatcaagccttattagcatcgcaccttgtgatcaggtgcggttgtgaggatggttaaggcaaccaaggaaagtcccgaaaattgggagtccgtttttctaagaaagcttgtttgccttctgaaccttcttcggtcatgtaataaagtaaagttgcattaccagccagttcttgtaaccctgcttggccatcacagtcagcgttaaatgctgcttttaaacaacgtatggcaatgggacttttttctaatatttcctgcgcccattttatcccttcggcttcgagttctgctacaggaactactgtattaactaatcccatttctaaagcttgttcggcattatattgacgacagagaaaccaaatttctcgtgcttttttctgtccaactattcgtgctaaataactcgccccaaaaccaccatcaaaacttcctacttttggtcctgtttgtccaaaaatggcattatccgcagctatggttaagtcacaaattaaatgtaaaacatgaccaccaccaatagcataaccagcgactaaagcaatcactactttaggcatagaacggatcaaacgttgtaaatctagcacatttaagcgcggaatcccttcatcatcaacataaccagcttgtccgcgtacactttgatcaccaccggaacagaaagcatattttctatctgtgtgaggtcctgcacccgtaaatagaactacaccaatattagtatcttcacgagcatcacaaaaagcctcataaagttcaaagacagttttcgggcggaaagcattgcgtttgtggggacggttgatggttattttagcgataccatcggttttttgatacagaatatcttcgtaggttttaacagttttccagtcagttgacatagggatgagttaactatggtgcttgagaattttatcaggtattggtgattggggactggtgactggggtggggactggtgactggtgattaggaaaaataactaataactaataactaattactcagaaatgttgaatgtcattacaaaagtttacatattcagttatagtagtcctattaagggtgaaaatgtcaacatctcatgatatcttccatccaataggattagcgattactcaaactatcggctgtacaactttcaatagctatcatcaaaaaaatcaagtaaacgctcaaacacctacaaaaccagcaccacaagaaattgtgcaagtgggagaaatacgtcctttacctggtagtttagataaaataccggtttttaatagcaacagtccagaatggatcaaaaatgaaggtattctactttctacttttacacctaataagaaaaaagttccagccgcacatttaaactttcccattcaaggcagatttgacctatttgctcatcattatacccacactcccaaggatttacaaaccttatatataggagtaattttacacaaccctagtaaaaaacctatcaccattaacgttttacaaggtgcgagttatttaatgacagaagcatcttttgttaccttacaaccctacatagaaaataacgatggtaaagcattttctggactaggtgcgagagcagtagcggatgttttgcggggagtacgtcaaaaacaatttccggcgaaattagattttgtgttgggttacgctgttgctaacccaacctactattctaaaatccaaaatctaaaattgtattatttaccaccatagaaaaaggcaatttctttttcttttaaaggagcaaaaccagcatcaaccagctttgcgtctaactcagcttggggaatatgctttgcaccaatacggacgatccgagaacgcatagtattagatacaccactgcgttgtctaccagcttctaaacccatgacttgattatatagttccaacttagcagcaggaataggagaaccgtcaaaatcaattccttgtgcgatcgccacatcaacagcatcagcacctgtagtagcttgattttttacattagtttcagtcgtcatggctattaaattctcaaagttattaggtatatattaccaggtcattgggcattgggcattgggcattgggcattgggttattagtcttccccagtcaccagtcaccagtccccagtcccctacacttgccactttgggaaattttagtttaatctcgaaccagcggtatagccatttttaggtgatgctatgtctgatgcccacactcctcgtaacaaagaccgcagcctcgaacaagctctaactaacaaaattatcgacgattacttcgagaattctgaaagttggctgagagcaattttgcggatgtgtattttctccctctctaaaatcaatggagaatccgtttttatcgtcgaatgtccgaatcaagccgtagcaaagcgcctgagtcgtaaaacttacccatttcgaggaatggtatattttttaactgataattttgatgaccgcgatcgcacgttattttgttataaagacgaacggaagggaaattggcgatgttttgatactagcaccaatacttggcaatctttaagcagtctgcaatcatctactactccaatggaatagggactggggactggggactgtggactgggtaatcacttttatgttttttaatcagctattcccaattcccaattcccaattcccaattccctaattaataacttttacgtactattgacccgccaacaaacgcgcctaatattgtacctgtccatattccggctatactaccctgccaaattgctccaggtgtgactacgacattacaaacttgctggaaaccccagctttgagtttgacatttttgattatgcaacatggaagtaatttgtgccgccattaaaccaccaaaaaagccagatgatagggctacaaaagtacaaattagaatgcgttttttgatcatggtgattggtgattggtgattggtgattggtgattggtgattggtgattggtgattggtgatatggggggattgggagaaataacaatatcttctcttacactctttctttctgtcacctgtcaccttcttcaaccagtatttctcattcctgcggcaataccgttaatagttaacaatgctcctcgcagtaactcccctttgctgtaacgagagtgaataacccctggtgtggtgctgtttttgtactgtcttagccgcttgagtagagaaacttggataaatcctaacggtacaattgttccattccgtaactgtactgaacgctgcaaaatcggatcaccgtctaaaagtcgttgatgtcctgtaatttttaagactaactccctggtgagatagaattcactagcaatttgctcaaatactttctcaaaacggggtttatcttctgggttcgacaattcttgtacgtaatgacgcgccatttctatgtctacttttgccaatgtcatttctgctttagaaattaccattttgaagaaaggccatttgacataaaagtaacgcattaattttaagtgttcttccggttgctcgttcaagaactgttgtaaggctgtacccacaccataccaggaaggtaacaaaaatcgggtttgtgtccaactaaagacccaagggatagcgcgtaaactgcttaaatcttttttaccagatggtcgtcgcgctggacgagagctaatttgcagttggctaatttcttcgatgggggtaacttgatggaagaagtcgataaaatcgggttgttcgtaaatgagagcgcgataatgttgacgcgacgcatgagctaattcttccataatctcattccaaggctcaatatcatcaaacccggttttcaacaaactagcttgcaccactgcactggtaatagtttcaatgtgatacagagctagatccaacaaagaatatttagaagctaaaacttctccctgttcagtgatcttgatccgtccattaatactatgtcctggttgggctaaaatcgcctcataagctggcccaccaccacgacctacagatccccctcgtccgtggaaaattcgcaggtttaaaccgtattcttccgcaattacttgcagggatttttgggctttatgaatttcccagttactacttaaaaagcctgaatctttgttactgtcagaataccctaacatcacttcttgcaagttggggttgagggtggtatgggaagaggtattttctgggttggttacttcataacctccagctaaaaaggcacgatacaatggtagttcaaacagttgtcgcatcacgcttctagagcgttgtaagtcttctacagtttcaaagagtggtacaacacgaatagttcctacagcgatcgctggatcaaataaccgtgcttctttggctaaaagcagaacttccaaaacatcgctgacttcccggcacatactgataatataagtttggcagatgttaatgccaaattcctgttgcagcgatcgcaccacccggaaagtttcaattacatcattagttttttccgaaaatggtaattctgcgggaattaatggccgtctggtttgcagttctccagttaaccaagctaccctttgttcttctgtgagttcgttataagattggggtaaaacctgcaagtattccagaatctcattaatcgtatcagaatgacgagatgattcttgacgaatatctaactgggtaagattaaagtcgaaaatttctacctgagagatcagatgatctaattctccacaacttaaacctgtttccgtcaaattgcgttgaattaatcgcagttccgctaaaaattctgccccagaacgatacatgggagaatcttcattgcttggtgtttcccgattatataaagccagattgcgatcgcgggtattttccagccttcttaacacataggcaagttttaagcgataaggttcttgacgataacgcaaagccagcgcatcgtagacatcactcaaaatagattgatctaattctaaagactccaacaaatctggaagtacatcactccagtgcattgacacacttaataattcaatcagatgctttaccgattgaatgtatctctctaaaaccatcttccgctgataacaagcggttttccaagtaacttccggtgttactgatggatttccgtctctatctgaacctacccaagaaccaaaagagcagaaatttttactgggtggttctaaccagggaaatgtttgttttagagagtatttgaggcgtttgtaaagttgaggaataccatcaaataacacttcttggaagtagtgcaaagcataatctacttcatctaatacagtcggtttaaactgatgtaattcatcagtacgccaccatagacgaatttcttctaataatcgctctttcacctctgctgcttcccaaggatagccaccagaacgagtttccgcgctatctaactgttgtaagagacttactacttgtcgctgcttatcgcggatcgtgtggcggactatttccgtgggatgggcagtgaaaaccaaccgaatatctagttgagaaattaaacgctgaatttgctggggtggtacattcagtttgaataatagaggaaataaagctgcaaatgtacctttttgtgtagctggtgttgtatcagtccaactgtgagatatgggatttcctccccatgacttagtaacaggtaagtcgtcttctcgttggttagtcgaataaacaatattgggaatattttcctgatctatgctgtctgagtcagaatagcggcttaactgttgcttttgttcatattcctgctcaatgatattaatcaattgaaaataaagagcaaaagcacgagcagcacgaatggcctcgttaatatttagctgttcaattagttccacagctgacgaggcttgatcattggtagcttgtccttccggtgaacacaaatcacgcaactgccgtaatagatccaccattttttggccgcattcttgccgcaacaccgactcccacaattcttctactatctgtagacgatgacgtaaaaataattcagacatagggtagatattcgctgatggcgaggaggagtataaaatagaacccatattctttgctctagtaaagccaattaatgcctacaattttagttttttgctttttgctgtaccagggaactggtgattggtgattggtgattggtgattggtgattggtgattggtgattgggaaaaatataataattacccattacccattacctattacctattaccaaagaaataccacaatcagaaaatgaataaattgagtgatgaggattacccagagccaataaatggttatatatagttgttagctgttgttagatgttgttagctttggtttagttactactgatctgggaagttgagaataggtagacgatcgcctctaaatacctcttcactagcttctcctatagctttgagtgcttcaccagttgctttatctgctacaagtagcagtagcatagatgctgtagctatttgtaagagaccagattggggaatactaaaaaagagccaatttaatccgggggttggtgatgggtgttgggttacagatgacattgctaattcttgatgatggccagatgagtaaaatagacgcaaaactcaatcttgagaggacgtgcaaccttgtaagactatctttgccgattttgcaagctccaatggtaacaaaattgttaaaaaaaaactgcaaaatgtgataaatctatggttctagtttacaagtacaggcaaaatcccccaatactcgcttcctgttaaagttaacttcataatgaaaacattattactagatcgccagcaaaccttagtgcagtgggtaagccaagcaacaggaattaacactttcggggtgaaagttcggttgctaggaaatgacctgcatatcctttgtgaaggtacagactgtccaaaacgttggcacacactctatgacttgttgcaagcacttggacaaacagatttagatagtctcacaaatgaggaacaatcctcaatataccaagtattggtctatggtcgaaagaaaggagaacatcgtcctcaatggtgtcatagagtctatttaaatcaattagatcgacatctagagcaagcagaacaagcacttttattagaaaccaaaaaatctagactacctggtggggcgctgatcgtctctaatgaaagtttggcacgacaaggcaaccccgatgcgatcgctcgttatctgagtgaaaacctaagtaagttgggtgtagcagtacaggttaaaagcaagccctacgagtctaaagccaactctcaaaaaacaggtaatcgtctctggatattttgccaatcaacttatagtcctgatgccacattattagctgaaccagtagcccaaaaattacgacatctcaagctggcaggttatgaagatgctgtgattgtctcccaagttcggggtgaaagtgagccagattggcggttaagggtggatttaactccaccagaaaccatgctcaaagaatgggcgcgttggggggatatacaagcgatcgctcgtttgttaactgaagttttatcagatttccaagttaccgttcaagcttctttaaaagaatttaccttacatatcttttgtactccagcagttgaccctttaaaaaatgctcttgcaccagaaaaggaagtttgtttacctttaattatctctcagttagaaaaaatcgccccccaaggcattctggccgctgctgtctacggacaaaaaacagaagataaacaacctgcttgggtagactggttatctttacccgctgcacaacatccggctttagcaacatccagcttagaattaggtgctgccggggatgaaccagcgatcattttcctactggagcgtctgttaaatcaggatatggattggcggttaaaaacaggcggcattcgcgttttattactgcgtaagggtgatttactacacattatgtgtgatgcgcccaattgtcccaaacgccagcaagtagccagcaaagtcacccaatttattcgtcaactcagtattgtcggtgttactggtgtgagagtttatggtcgccgagccggtgatactgaacctgtttggcatcatggagttgattttggacatcgccacagattagtaccagaagctacacccgaatttgcagctacggtagaatatgtcagtgatttactgcctaaggaaaccaacgagccaattttgcgtcctgatttaacaactcaggaagttcaaaacttggtaactgaagtaacacaagattggctggaaaccgctcatcaacaagtcagaaacttacttttagcaagccaactgtttacagcaactaaccaatcaactgagcaaaatcccgatgaacaaggactctggggaagtttcatctgggtagctttgggattaatactcgtactccaaagtgattggatgttaggttacgttactactaagattggacaaaatacacccaaagttactggtactttaacatcttcatcctcacagtctcaggtctctttaacatcagaaaaaaatcaaagtcaaagaacaacattttttaccagcaataacaacacaacatattctcagtttggtaattctgcttttaatgcttcttcatttacccaagctgatgatactccatcaacaaatctctcagccgctccattaaaacaaaaagccaatgctactgctattctcttggctgcaagatcaaatttacccagttttaatgctaggcaattagatgaacaattcgcactttataaacagcgtctagcaacagatggaaagccaccagatgtcctaattatcggttcttctcgtgctttgagaggagttgatcctgttgccctttctaaagctttgtccactcagggttatcccaaagtagacgtatttaattttggtattaatggtgctacagcccaagttgtagaatttatcattcgtcgagttttacaaccatcggaattaccaaaaatgattatttgggcagatggttctagagctttcaatagcgctcgcaaagatatcacttttaatgctattgctgcttccaaaggctatgaagaggtattaaaaagagctacacagcctgttaacaataattcatccagccaacaagcaaatgcagtgaaagatgagctaactaaagatacaccagtaaatgttaatacttatcaagtgactaatgattttttaaatcaagctttagttggtatatctgccagctatgaaaatcggggacaaatcaaggctttattgcaaaaacaacttaactatttaccagttattaataactctcagcaagtcaactcaaaaaccgaattgaccagcaatacacaagagcaaaattcccaagcagccgttgattttgatggcttcttgcccttatctattcgttttaatcctgctacatattatcaaaaccatcccagagtagctggagcttacgacaatgactataaagattttcaactagcaggtaatcaagacacagctttaaaatcaatgatagagtttaccaaaaataaaaaaatatcattagtgtttgtcaatatgccattaacaggagattatttagacccagtgcggttaaaatatgaacaagaatttcaaaaatatatgttagatgcttccactactaatagcaattttatctaccgcgatttaagccaaatctggctcaaagcacatgactacttttctgaccccagtcacctcaaccgctacggagcttatgaagtatctaaaaggttggctattgatccgatgataccctggagttttaaataaatggtgattggtgattggtgattggtgattggtgattggggactaataactaatgactaataactaataactaataactaataactaataaccaaaaaatgaaatttatatcacctttttacgcgctgtttttgctgagtattcttggtatttactggactgtaagcgaacaaaaattaagattatggacaatactgatagctagtattgtattctactcatcttggaacattcaatacttaccattactattggtacttacttttattaactttcgtataggcttggaaatcgggaaaaatacctcaccaggtaaacattcccaaaattggcaactttctaatgaagagtggcaaattgctcaatctgactggaatcttaaccgtctaaaaactttgtgctttgggattattttcaatgtaggattgttattaggttttaaatatctacctatcatatttaaatggatatttgagataaatttaaattctccagatgccccatttaaattagtgacacccttgggaatttccttttttacatttgagtgtattgcttatttaatagatgtttatcgtggagcgccggctactgaacaatttttgaaatttgctgcctataaattattttttgctaaattaatttctggaccaattacccgttaccataacttagcagttcaactcaatactctaaaattccctaatgttgataacttatcagaagctttatggttaattgctagaggtgcggttaaaaaaggcattctcgctgataatctaggaatttttgtagatttatgttttggtaatttaccaagagcaggtagcacagatttgtggttagctactgtggcttatggtttacaattatatttagattttaacggttatgtagatattgcccgtggtactgctttactttttggtttagttttaccagaaaattttgattttccttacttcagtaccagcattgccgatttttggcgacgttggcatataactttaggtgattggttacgtaattatctttactttcctttgggtggttctcgtcaggggttgatgcgtacctgcttaaatttattcattgtgatgatagtagcgggtatttggcatggttctgcgtggggttttgtagtgtggggtgcgttgcatggtttggccttagctgttcatcgtctcacagatgctataagcgatcgctcaaaaattctttacctattttggcacaaccctgtcggtataattttcgcttggttgttaacccagttcatgattttcacctcttggatctggtttcgtctccccaatattcaagattctgctttagttatacaacacctttggggtcatagtgcggattcacagtttattgaaaaagtctatgtcgaagccttaaacagcactcctcaccaactaacatggtcattggtgttgatcgttgttgtcatgagtatagcttatggctttaaacgaggcatgaaattagagttgagttggccgataaaactggtttttgtacctttatgtttctatgcagtttggttactagctcctgaaggcagtttaccttatatctactttgatttttagggacttccaaataaaaaaatatccaatccaattaattataagaaaatcgagtgagccaaaaccacgcccgataaagtatctccaccaagttccgatactttatcgtactttaggctgtggatgtacgcgaacggactgccccagacctctccaaaatagaatgtattaatttgtcataagttgtaggggcgaagcttatgggcgataatttaaggtaaaaatcagacatctagatatcccaaatgcttcgacctgcccccataaagcccccataaataggttccataatttcttttctggagatgtctaatggttaatctgtttcgttgttgggttgccaatgattgtagtagctactttagtaaatcgctttgatcctaatttctaaacaaatctaaagttttgtaaacttaataataagtaaaagttattacttttataaattttaataaaataatcaatgttacaaaactcgtaaacttatgctaattttataagaacaggaaagaaattacctgtgtttttaacaaaaacatcgcactcataaaatgaccacaaccattcaacagcgccaaagcgccaacgtatgggatcgtttctgtgaatttatcaccagcaccaacaaccgcctttatatcggctggttcggtgtattaatgatccccaccctgttagcagcaaccacttgcttcatcatcgcatttatcgctgctcctcccgttgacatcgacggcatccgtgaacccgttgcaggttcattaa

SEQ ID NO: 99 - DNA, 14398 bp, Sphaerospermopsis sp. LEGE 00249
  LEGE00249_117
tcagaaaagtattcccaaatgcttttgcaaatgggatagcgagtgtcgccgttacaccagtaaaggttctgccttttaaagtgccattctaaacagatggatatttgttcagtttagcacgaacggttaataatatcaataacatcgtcactttgccgtaatttattgataattaagttaactaatttatcggcttgactagagttaacttgtccaaaatcaattacacgaattttgttatctttacccaataaagcaacatatttataggcattccacacgctttcttttaagttggattcacattttttcagattttctcctaattgtcggttttggttttcatctagtccttgttcctcgtcccgtatatcttcccaagctaaaacttttctcgcttcttctcgcagtttggtatcagtatcagcaactgcctaaattatcccacttttaaaggttctatctgatgtaccacattctttagtcatggactctatcatttttagagtctgactatcctggatagaatgttctggtgctaatattgctaaagttaaaacaggacgattagaaattgtactagaattttctggaaagtaaattaattgtattcctggatgggaagtaaaaacttttttaatttcggctttgactctttctgcaattctttctgattggatattggcgcgacggtctgctaaaattttgtttaagttgggtgacagactaaaacgatatttatttttttctattgacaaataataacaatctgtagctagtgtctctaaaactgtttctacattgccaatatctaaagatggttctgctactgctaaccgaatttctggtatagtagattctgcacgtaaaataccaccattagattcaaaaaatattgtggttgtgactttgcggtgcagtcgtgcttttttaatttggtcatcagctgccatatctaaacgaatagcatgggaatcttttttaccacaaatatcagttgttactgcaccttctaatctatcttcgcctaattgtccaaaaacagcagcgcgaaattgggggttatctagtggtgctgttcctaaagtaattaaggggtcacggtgtgcgccttgatatccttgttggtaagcattagatacccacaatgctaggagtcgtaatactcccctggtgcgttggaagcggggtaaaacttgccatttgcgctcaaatactgatagcactgagggatggaaaggataggtagcataaaaagcttcacgggggttatctacaggaaaccaattaggaagttgttgacggtggtctagtacccagtctgcgtattcattacaggtattaatagcatcttttggtaacataatcctaccatctgcactgacagccccagcatcccattcaaatagtcttcttctgataatttctgaagtttctgcttctgctgacatgatgataggtttacccaccctatccagcatttttttaaatctttgttcatctccttcatcggctgaggtgtattccatttcggaagcgggaatggaaactactaacactacattatctaaacctctagccgtttctgataatgcttgaatgaaattatataaactgttgtgataacccttgccacgataggtactaacataattaataatttcatccattaatattaaacagggttgatctttaggcagaaattgtttaataacatcgcctttaggttcaataaattctgcttcgtgttgtgctaatatagctaaggcattttctccacctaattgataagcaatttctccccagggagttttccgtaatggtgtaccatcattaccaccgcggccattaagagaatcaaattcagtgccgacaaataccgctactgctgcttttggaactgaagaaatacctgctttttgtaatatcttttgtacaccagtccaattattagcaatagcaccacctttagctaaatgataaagtaaagttaaggcgtgggttttaccgccaccaaattgagtagaaagattaaaaatagcagaagtttctgttttttcacccgataaacgtcgcacaacttgggcggaaaattctgttaaatatttagttaaataggtacgttcaaaaaacctttctggttgttgatagtcagcaggtgctttttgatttctaacctggtctaaatgtactgcaaattccgcagcatctaaaggtttaccttcccgtaggtcttcgcggggtgttagtccatcaattttgtaccaaggtttaatagttgccataaataaatttaaatgtgtgtgggagtgcggagtggggagtgtttgggttatgaagttaaaccagaacttcttgaacaatttatttgctaaactccatccatcttgaaaacttgagtttgcgccataaaaaaactataggtttcaacttgaacggggcttatagcagaaagcaaaaggcaaaaggcaatagtaaaacccttactatgattaggtttcaatactcaatcatgtcctaatcatcctggctacagctataaatgagaaaattgatctcaaaagtgaaggatttggataggatatagaattattcccctactaatcttaatgcttgatttatcactttatcagataaatacattccacagaggcgcagttgttctaaaactgggcgtgcagatggaattatccctcgttgtttagctgtaagaactatacctaaagttccccggaggggaatgcccaaagctgctgcacaacgacgggctgctaaatcatcaataattacctcagtgccaggatttacataagcccaagttaaaaccgcagattcaccagcccctaaatcccaagtttgaatgatgctgggtatgggaggtgtttctgtcactaccaaccaggaggtatgagcgagactagaggcggtgatgtctgtttctccataagcctgaatttcagtggacactgcttgaggaacagtgatttccgggctgactatctgcaataaatggagaaaaccacctttagtcaaaaaaattaggggagaggtgttaattgcaggtttgatggcaatacttggcaatttttcagtcacggcttaatctttgggctttaataggtaattgttggggacaaaatacaggtttttattcacgggctaattcttgttctaaatcatcaaaatctacagaaaatacatccacttgttcacgggctagggctgcaagaaagtcgcggcggtttaacccggcaatttgtgcagctttctcttgagaaatttccgctttttgataccagtatatagcggctgctaggcgcatatcacgtacaaagtcatctggggaaagacgacgggctgaaaatacttctgggggtaagtctagatttactttcgtcataaagttagcttccatgaaaattaaaatcctagtcctttctttctggctaataccccatctacccagcgtttttcctctgtaccggtggggtataatgcggataatgcctgagcaagtccccaaaagcgttggttgtttcctgctccttcatctactcaccgatgccaccggagtagtataaccacaacagggacaggtggcagaacctcttttaacagtgccatcaaaactaggattttttacttctatttctgggttatcactaactacccatttactcttttgcttttcaataatttcaaaatctacccgcttatcttccggtttcggaattatccttaaaccaatattgcgattactttttttacacaaatacaaagaccgcattaacggcacttccgcaccacatcctggaccttcacaaataatagtccgcgcccataaataagcaattggtgtactaccatcagcatcttttggataaaattgggctaactctttttctgcttcttcctttacccactgtccccattttcgcacttcatccgctaaggtttgtccgtacttaggaatatattccaacaccaccttatttaacaatactgccaccgggttaatatcagaagcaaaagcatccgcacccactcgcaacgcttccaacggaatagcaccaccaccagcaaaagggtcaactactaatggttttgttcctggtattcctcctaaagcttcatgtgcagcttgagttaaattccgactggtttctaaataatcagtttgtgtagaattatcccaattagcaaaatcagcaataaaatctagtaggctatttcttaatatattccagtgttgaggattatgagaatttaactgattttctggtttagctaaaacttgccatttagtccatatttcagtagaacaatttttagagaaatcactatttatagctatagcttttttagcaaaattagtaatatattccgtagctaaatctcgaaaagactggggacaattttcatcaacagggtcaggccataaagccgcacaaataacagcccgacaagcggctaaaggtcgtcttgcccaccaaatatgtaatgtagaaatatgcccatgtctgatggatttctcccgtcgggcgtgggcagaaatgcgtttaatgggtaagtcaacttcgatgaggcgtttagggtatttggtggtgttcatggttttttgtttgaattagaatttcccgtaatttttgactttcagatcccggacttctttaagaagtccgggatctaagcacacagactttcagatcccgaacttcttaaaaaatttaagaggcgtttagggtatttgatggtgttcatggttttttgtttgaattaggtggttattgaaggagtaacttgtagatgaactaccccatcttacttcattgaagatggggtttctacatccccatcagtaaagttgatctactaactctttgtctcataaaggttacaatctcaattagtcattaatcagaattggattaagcagaaaaaccacaccaattacatggtttattaatcactctgactgactgattgaaaaccttaaaatcctttgttatcaagacttacaaggtatttttaaaagtaatcaatcagcaattagtgagtaatttatgatggatatttttaatatagcaactatatccactagctgacatattggatgtattggatattgttattgtagatgacgtatatgataagatttttgtatgagtacgttaatgaaataatggatataatggatatgatggataaacaaaagagtaaaaaagatatggcagaaataagagtttttgttaagccagaattaagacaaaaatttaaaagtaagtgtgtactagaaaataaaaccatgagtgatgttattgctgacttcatggctacttatgttaacgacaatcaagaaactagccacacttaaaacccaatgacagttagagcgatcgcactaacaaccccaaacaaccaacccaacggaaccatgacaactgaattaagtagattagaccggatagaagtgattttagagcgcgtggcggtacaacaagaaactactgctacaacactggataacttaacaggtaaagttgacgatattacttataaagttgatgactttattaatacagctaccagtgttttaggaagaagtgccattttagatgacatcatagttagacttgaccgcaattttgaactacaccagcaacgatttgaggaaaaccaacgctcaattaatgctgctttagaaagactagaagcaattttgatgcaactaatggataagtaaagcgatcgcctaaaacaaaattaaagactttcagataccggacttctttaagaagtccggtatctaagcacttctatattatacctcctaaaaggtcttctgttttcaattgataatgttctatttttataaatggttgccaatttaatctcactggatcttgaatagtatgaacttctggagatgccttgtctaccgacaggcaggaagcacaattaaatactacatacaaccagtaatcacccttcaatctttctgccgttttatattcattggttgttaacgctacctcaccaatatttgcccgtcctttgacttcaataaacctgactttacttgcttttaatggatctccagaatcaatttcacgggatattaaatcaaatccgcgattctctttttctacactgacaacttgccaacctctagctttttcataagctataactgcctgtattgctattttttcaatctcatcatcagataccatcggcgcaatttctggagaagttctttcaggatggggtaatacccaagcacgtccatgatgacgaatatcagtaattgcacaactggcttcttgctgcaattcttcccgtcgctgttctaacctcccatttaattcaaataatcggtcttctaattgtttaatacgaccatctaacccttgttctttagaaccagattctttcagttgaaataactctgcatattgaatctggactttatcaataatcacattcagactaatttctatatggttagaaattgtctctacttccttttgtcgctgtgtgcgaatttctgttaaaaagctatttaattcctgttcaattaatgcttgttctacctgttctcgactgggtaaattactatcatctggtaaataattaactaaattaacagagttattattattgtgattattctctgtttgtacttcgttttggctggtaaaatctcctatttttgctggtactaaatctaaaaataaagttggttgacggacagtcattgttccatctaactctgtctgcaccacatataaacgttcatggagttttctaccccgtccatctgcgatcgcagccgagaaaacatccaacctcgctggtgtctgacggtgtaaatcaaaaaacaccgcaccctgacgcaaatcttcctgtacttggttagaaacctcatctcgtacacattcaaataagggatgtcctggtgtcacccattccaatgtcgggtcatctgtcaaaatatttttatcaaacgtaatctttttatactctcgtcccaacttaccaaagcgattttctaacctatctcccgttgcccataaagtccgaggaacacgcccaattctgtatattttcttacccttagctgtttccttgggatgaatccccgctatatgtgctgcttgcacaaagaaatcatggataacttcaggtactaatctccgttccttagcttcagcagatttaccaattatttgtgataaatttaattctcgtttagcaagtccttctaaagctgaatcactaattttacggaaacgttctgtatctacctgttctacaatgcgatcaacaattacagcctcagtaagattatgagcgtacatatcccgaatcatccgttctaactgattagcagggaaaatatcacccagtacattgaatactttacccgtcctttctggatctaagtccatttcaatagcgtgaatccgctcaaacagtttccataaaactttaccttcgctggtgttaatagctacaaagttaaaaattagacaatccttatcctgtccatagcggtgaatccgtcccatgcgctgttctaaccgcactggattccagggaatgtcataattgatcataaaccagcagaattgtaaattaataccttcccctgctgcttctgtagctactaaaacttgacaatcttctctaaattcccgttctgaataaatgcgagtattgggcgtatctctatcacctattttcattccgccatgaatttgagtaacagttaatccccattcttttaattttcctactaaataatctaaagtatctttatgctcggtaaaaatgagcattttcatttttggatctttaaatattcctttttgggtaattacttcttttaacttaactaatttagattcaatttcccgtttttctaatattagtgcttgactaattagttgatttaattgtataatttcctgtgtcaatgcaaagggatctatggaagcaactacaccttctaaatcaccgataattttttgttgttcgggttctggtaattcttcaaaattgtctggtaatttcttattaatttgttcttgacgatagctttctggatcttctaaaattctttggcgtttatcgcgcattctttctaaactacgacggacagcgtaaatactagaagcaaagcgacgttgtaacatagccatggtaaaacctaacgccctacctctggctgtatcatcactggcagctttgattgattggtcttctacataatcagtaagtgcattgtaaaattctaattcttctgcatcaatttgaaattcaatagtttcaactttacggttagtgaagagttttttaacaatacctgtttcttcagggaatgtaaccaaagcttctttagtccgacgcaagtagaaaggagcattattccgtttcattgcttcttctaaactttggacatctccataaacatctcggtctaataattctaggaataaacaaaagttttttggatcacctttatggggcgtggctgtcattaataaatagtggtcggtaatttttgccagttcttcaccgagtttataggctaaggttttactatcggaactgtaggcactcattttatgtgcttcgtctacaataattaagtcccagttacttcttaataaactgtcttttgcgtcttcgatgcgagaaacccaagatacggaagtgacaacttgatttttttcttgccagggattagaaccatagttagcgcgtagcacatcaccgcgtatcacttcaaattcttctcgaaatttgtctttgagttctcgctgccattgaaatgtcaggttagcaggggtgataattagtgtacgttgaactaatcctctcactttcagttctttcagtagtaaccctgccatgatggtttttccagcaccggggtcatctgcgagtaagaaccggatgcgtggttgtttgaggaaatagtcgtaaactgcttctagttggtgtggtaaggggtctacacgagcgatcgccaacgcgaaataagggtcatattcataggacaaccccaaacgtaatgcttctacaccgaaccgaaaatgctgggaattaccatcaaagggttctttttccggtgtagattccaactgttccaactgttcagcattgagaattggttgataggtatggttagtgttgactcctgtaccaatgagttttattgcatcacccattgatacaacgaccaatacctgtactggttctggaaaaattgaaccatgtacaattacatttgctttcagttggtctagtttcatgctgtcaccattatttgagaaatttctacttgtgcctctttacttcgttcaattgcataacagttagtagtgttatagacaaatatctttaagctacttttcccggttttacccggaatgggctttcctgcaataccccctctcctccatcttctcaagcttttgcttaataagatttttacatctgatttatagcttgatgtagcaagtcatatatcaataaaaataataagctgttacacagctaaattgtataatcctaatattctgaactcttgtttaacaggcaagatgcctgttccacttatacaaattaaatgcacaacagcttaatcacatttaagtgtggttgtaaatatttttctagattattgtttgttaaatttctttgctgaaaagataaatattgtaataaatcttcagtaaatacctcagcagcaacaatgtggtttagacatataactgtaaattacttaaacaatactgcgttgtgtcacgtaaacactaaacctcaaaaactaccaaacatagcggttttacataatttattaacacttcttagcaatgttggacacacattttcaacaaaaaacctcaatatagttgtgttgtactactaaaaaggtcaggttactggggtatgctttactcatactactctctgggtcctgtttattatctattcacagcttatactgagagagcttttttacatcctttccgacttttcaaacatcctctaagggcgaagcattcgggcaaccaattatcaattttgatcacaggttattttccgaatgcttcgcccctacgactcctgactcctattcctaactagcaacttgggttatttaatttatttatgactttatcccctcccctaaattctcaatcagatcctccccttccccctggggaaagcctacccacaatgtatgatttacctagtgagaacccagaggaaaaaggtttgccagacgaatttcattttttacaaccattacttttatacctaacttttcaacctataaactggccaccagaattggtttatagtgctgctgatctgaatctttattatcatttagagcatcctttatggtataaacgtccagattggtttggtgtaattggtgtttctaggttatataaaggtgaagatttacgtttaagttatgtgacttggcaagaaacagcaaatccttttgtggtagtggaattattatctcctggtacagaagatgaagatttaggtaacaagcaaagtcaaaaagatcaactgcctacaaataaacctcctacaaaatgggaagtttatgaacgtattttgcggattccttactatattgtttttagtcgttataccaatgaactccgcgcatttcatttagttggtggtcattatgaaccaatgaatttaataaatggacttttacccatgccagagttaggtttaagtttaggattatggtcaggttcatttcgtggtatttctaagttgtggttaaggtggtttactcttgatggagaattaattcctgaacctacagaagaagctactaatgctaaagaaagagctattattgctgaacaagaagcaactcaagcaaaaagaaaagcggaaatactggctgaaaaattgcgtcagttgggtgttaatcctgatgaacttgatgattaattaattaaatctttttgtcagaatcaggatgtccaggatttaaggatttacaggattaaatcaggatggaaaaattgattaattaatctgtcacctgtcacctgtcacctgtcacctaatattaagaaccttgatccataatcatattttgcacgattgaagctgtagcaggtgcgagtaaaacaccgttgcgataatgaccagtggctaaaatcacattactataattagctaatttttcaatcacgggtgctggtctaccttcaggacggggacgcataccagaccaagtgcggagaattttcgcctcagataaatctggacaaaaggcgatcgcctgttgtttgacagattctaacaattcttttttagctaaaatctcatcttcattattgggaaattctaccgtagcacccacccaatagtcaccattacccataggtacaagatgaacatcattgccagtaattactggttgaaaatcaggattgcctaaaacccgtcctaaacttaaatataaagcttgtcctaaaactgggcgaatatttaccttatgatttaattgtctagtgagtaaagttgaacctaagccagcagtcacaataaaccaatctgcctcaactttaccttctgaagtttccataaatttaagtttttcagtaacatggggtgtgatctgaactatgtcagtagaaggggcttgatgattgcgtacagccacaccaaatttaaattttaccccattgcgttgcgctgcatctaccaaagctaaagttaacgctgtggggttgagttgcaggtcttgaggagaataaacagcaccaatcacagtagaattattaacctgtggacagaatttttctagtttttccttgtcccacacagctaactgccatccttgagatttacgaatttcccgtaattgttcccaatctgttattacctccacaccactttctaaagggtgttctgggtcttcagacaataacatgacaagaccctgacggttacaaggaattttccgccctgtgatagcttccagttcaggaattaaagtttgataacgtttaatactttcttcccggatctgccaagctttacccttggttttatggctaataatgcccattaaaacacccaaagccgcagcagtagaaccttgtgctggttggtttttctcaaaaacagtgatatttaaacctttaacttggctgagttgataggcgatcgctgccccaactacaccacaaccgataattactatattcataaattttgtaaacggtgagggatgaagagttaagactatcctcttcaccctatcacttgattaacctagcgttttgtgactcaagactcagagttatttagttgtcagtgattagttatctggttaaagctggtaataggtaattggtaattgataatgggtaaatctattactgtccccagtccccagtcaccagtccccagtcaccagtcactttactctggaatcagttgtaggaacttgtcaacatctgcaaaggcatctttgtaagcacttaaagcttgactggtgttacctgcaccagcagctttgtcaatttttaccaaatcactcaataaatccttggtaatttgtctggctttagactggtcttggggtaataggttggggataacataggtcatatttaacctagcttccgtcattggtccatgaataaaattacccaccttgatccattcaccgctttgaatcagggtttgcagttcttgtgagcgatcgcgcaccacctgaatatcaggaaaatattcctgaattttggcaacttgagccggtgtgtaagttggaggtgcagtagcaacactaggactgccacagctgatcaggaatgtagtcaagagtacaagaatcagtgacaaaatagagcgttgacgcaccataaaaggaaattaatttgctatttgtttaccaatttacagtgtcattttagatcgctactgtaatttttcgttcctactagtgaaagttttgtcaaaaattctctcacttcatcgggaggaaattctggcatcctgacacaagagggcaaccacggggggattgcccctactcctgtgataaatgtgaggaaatcttcattcacagttgcaaaacttccaatcttcttgataagctgaaacactaataagacaaaccttctggcgggttttctgttttcacatcccccacagaccgatgcaatattaggagagttttaacgtgaatgcagctgaacaggcaacaaaccttgaactagccagcaagattgctacagtagtgaacttgtttaaattagagtttcctgatgctaaaagcgatcttaaaccttggcataatgaccaagaaaccagggaactcgtagatcctgattccatcgacatcggttttcactttccgggaatcagcaaatcttggcgctgtcgtagcgttttatttcaaatccgtttttatcaagatcccatcaataaatctcggcgagctattgggattgaagtatcaggatttgatcatcgtgggcaagcatggcgactgtcaacggtagatcaatggagttttgttggtgagtctttaccttctcctgttattggtgacaaactcaaacaaatttgccgacaaatattagaagtctttaacataaattctgattgataaggagtcaggagttatgaattttggattttggattttggattttggattgttttttgcaaattcaatctaaaatttataatctaaaatatttctctctatcttcccacaccttcccaagctaacaaatatcaggacttacgcaaaagggaacgaaagtaggggtaatacccttcgggaagcaagctacatgaattacccctacgcaagaataaggttttcagtcacatcttgcgtaagtcctaaaatatgataaatattcaacagaaatatctcaaattttctgtcataaatataattctataattctataattctgcaagttgaattaatcagcgtctaaatattccccaggtgttatctaccatcaacaccacaccgaggaaatatatgcgcttttccacatttggtaaatcaggtagattttcttttccgtttgctgttaaatgtgttagctttacgtttttttttggaactttaatattttgtggtttttatatcggttcttccatgatctcctatgttatctccaactcaaacactattcaccctacctcaatatctggtattaaagattaataaattggtagttggtaattggtagttggtaattggtaattggtaattggtaattggtaattggtaattggtaattggtaattgatgattggtaattgggaataataaaattgattacccagtccccagtccccagtcccc

SEQ ID NO: 100 - DNA, 14321 bp, Sphaerospermopsis sp. LEGE 00249
  LEGE00249_119
ccccagtccccagtccccagtcaccagtccccagtcccctcctcctgacttctgaatttattcaggaactcccatctatttgttgaatttctaattagatagcgtgtcttacctagagcgtcgattcagtaatgctaggtaatctcttgttacctggtaggggcgaagcattcgggtgataacctatcgctgaaaccagttcatattccgtccgaacttcgcccttacgattaatgaatcggtgttctagaagaaattggagtaaaaaaagttctatgctttcatctgaaaaatcctctttggaggcgggtttagctgctctcaaagagggaaattactatgcggcaataactcaacttttgcctattgctaatcaaccagaagacagcgatatccgtttgcaagcactggttggtttagtgatgtcttatgcacacacaggggaaatatcaaaggcgatcgccttgtgcagaaatttaattgaaagtgataattcccaagttcaagaatgggcaaaagttgcacttgaacatttaactaaacgacaaaaaagactcaaatcaaaatcacatcatcaatcacacaatattgtcaattctactcaaatcactaagccacaagcaagtgtatcaaacaattataccaataatatctatagtaccacagaaacaaccagcatttattggcgacaagctagacgtgcaaaagtatggcaacctctccgtaaatataatttaataccttcccgattattagctttagcaactttcatggctttgttttgggtattacgcgccatgttagagttaccaatggctttaaccaatcagattttagataaacttccttatgttagtccattgccatttttatatagtgattttactaccttaatattagtcccgttgttggtgttgttggtgctgtctccttggttgttagattggttactaacagaattttatcagcaacaaccgttatctaaagaaattttgtatacctatagtcgggaagcagtaaggatcacacaacgtacttgtcagctaaaacgttggcctgttcccacattccagattttaccaatagcagcaccgatgatgttcacctatggtaatctacctcgtaacgccagaattgttgttagtcaaggactcttagcaaaacttacagatgatgaaatagctactatttatgctttaggtttaggacaaattaaccgttgggattttggggtgatgtctttggctttgttggtgactttaccgatttatcaactttatcagcaagcctcaactttggcaaataaaagtgagcagaaaatttggtgctggactgctacaggtttggcgggtttgtgttatggtatttggtgtttattgacgggtacaactttgctgaatgcgcggtttcgcctttatgccagcgatcgccaagctgccgaaattacaggtaatcctaatgggttaattcgtgctttactgaaaattaccattggtattgctgatgatatcaaaaaacaagaacataccagtccgcaattagaaagcttgaatattttagccccagtagattttcaacacagcctctgtttaggtagccttgccggtcatttaccttgggaatcattattaatatgggaaaatagcaatccttatcggcaatggtttactattaataatagtcatcctttattgggcgatcgcctgcaaggtttgtgtaaaattgctcgtcattggcatttagaaacagaactacattttatccatccagagttattgcaagttaaaccacaatctttcttattacaaattgccccctttttgggcattcctttaggattgacattagcaggactgttttggttagcttggcaaagtgcatacaccttgcatttatttaacctgaaatggatttatgatgattggtcatttgtgacaggattcttaatgataggctttagcattggtacagtcatgcggctaaatgcctttttcccagaaatcaaatctttgagcttagacagtgatgagcaaattttgcagctattaacaaacccctcggttttgccactggatagcgtcagcgtccgtattattggtaaactgttaggtcgtcgaggtactagcaactgtctagcccaagacctgattttagagtccagcatcggtttagtgaagctacatcatattcctgggttagaactcaaaaccacaccccaagaattgataggtaggcaaattatcgttacaggttggttacgaagaggggtaacaccttggatcgacattcaaaccctagaaactgaaaatggcacaattattaatagtccccatcccattttttccactgttttagccgtcatcgcccaagcttggggagcttatataatgctaacagcccaatctctagccggataatggcacttgctgcctttaaaacccaggaaatgtaaataaacgttgcaaacttgaactcaataatgttacatttgttcatgaaattaatagcaactgacctaactcagtcacccaacttagttagtgattctgctactgctaatattccatcccccttaatccttaccaaaacagcaggaaagcgaccagccgatggctggtttttgtttccaaaaatccccttgtgcaaaaatgtattgtatactacgatgctataatgctataatgcaatctgcaaaaatgtgagtgctgaactagctacgtaggcaataccatgataatgttaagagatggtatttcgttctgcgggttaaagctggaaagaattcatttactgtagtagacagttgactattaaattgagaatcctgagaattaagatggtattagctgggcatactagcggtttagtcttaaataagcatcatcctcacaaaaaacggtattgaaaaattgcgcccaatctatagacaaacatgagcattaatattcataaatttagtagcgccgcaactaggtctacaaaacttatcagcgtgactattgaccgtgtaataggcactatagattgtatacaagcatattgttaagattatcatggaaataattgagcgatatattattcaaaaaagttatccccataaacaggagattgatgatttatgtttttgtgctaaaaatttatacagttatgctaacttttatatttaccaaagtttgattttgaagcataaatatctagatgttaatttccgagaaaagcagttaaagaattttcaagctgacctagctttatctactcaagtagtaaaaaaatatttattaggtttagattttaatttgttaaacctgctcacagcaattaagatatataaagaaaataaaccagaatttttagagagagacaaattactcaaatatcaacacaaagaaaagagcagacagttattagtttatattgatcagatcgtgagtaaatcgaaaatgaaagcagacttgattcatctatcaccaaaccatatttgcattcctactgttgtagattatttctgtctgcatcgagtcaggaatgtacccaatattgaccatgatgtggtagaagttgtttatgaaaaagaggagttagattatgacttaaaacaagatgcgattgcagcgattaatgtaggcagagataacctagcagcgttaactgctaaccaacctagatttgtgcaagttataatcaaagggcagattatcaagtcaattaatcgttattacaatcaacaaaaagctaaattaaaatctttactaccggctcgtaaacaaacatctaaattgttgatgttaatggtagtttaatattttaatataaagtattcccgacagcgtttagccaagggataggggcgttatagttctccctgttggggtgattccctaagaacaaacaacatgatataaatgtatgttcatggtatgttcatggtatgtttattgtatgttcatgtagtttgaaactatagtttgatagttggcattaaaaaattggtttatggcgatttttgttaatagcatctatttaaaagccaaagccaagtcaatgtttttgttttgtcattttcatttccacactggaggtatagttcatgtccgttcgcctatacataggtaatttgcccaaagaagaaattgatcgtcaagaattgcaagctgtatttgcggctgaaggcgatgctgtcactactaaactgattaaagaccgcaaaacaggtaaatgtcgtggttttggatttttaacggtgaacaacgatgaacaagcagaccaaattattgaaaaatataatggtcaattgtttaaagatgctgccattaaactagaaaaggcattaccccggactaaaggtgatgaaggtgaagaacaagcgcccaaagctgctagtcaaggtagtagcactcctgcacctaataccaacaaagaacgccgtgaaaaaggatctaaaaaatctcgccgtggtggtggtggatctcgtgagacagttaccacagctgattcagacgcaattcgtccagatccccgttgggctgataagttagaacaactcaaacaaatgttagctgctgccggctcctgatcctccaagtccagtgctaaaaattaaaaatcacaaatatagcaggagtcaggagtcaggagtcaggagtaaaactcgctgctcgtgggattttcatgattaactgatgtcctaactactttgtctacagccatatcacaaatgatggagatttttaatttttggttgttcttttgtagctaaggctactaaatttctctgaaatcaccagccctcgtggactgttttttgtgcaaacaaccaacaataacagaggcattaagcagtgttgaaagctaaatctggcttcagcactgcttaattttattaaggggaatagggaatagggagaaagattttagattttagattttagattggagttgacaaaaacaatccaaaatccaacataaaaaactcctgcccctgcccctcacaagggtaggtattttacattgtcgtcagggcaagacttggtggacaaggtgacaagggaggaaaaccgtacaaagtctgtattcttagtcacaaaaatagtccgtcaaaaaaccattgtccgtataaaatcttccttgtccactttccctccttgtcttcctagtcctgtgaactgccttctgccccctgctgtaacttttttacaaaactgtagcttatttaacaaaaataaataattcataataatagtataagtcaatactgtattttaaatactgtagtttaaaaaaagtaatttcaccaaaaaagattgtgaggatgaaagatgtgtaagctaaacgaaattgtcaattcaacagtaattaataattgttttatgggggaaacaaataatgtcaatcagtgaataaaaatatttaaaattcacgtattttatgcttgttaatcggcgcattaagcattaattttgcattaattaatgtctgatatatcattgatattttttttattagtattaaaaaaatataatttcatctatcaaaggtattgaatattaatatacaaaaatacgtgaatttgatgaaaagttacccctgaaatcatcatttataaattaaaataaagattaatcaaagtttctaaagaattcaggtaagcgtgaacagcgtaaacttggaaacccaaactaccttgtgataatcagcaacacacaacttatgaactctaccagtaacaaacgcattgctttgatttcagtccacggtgatccggcgattgaaattggaagagaggaagctggaggacagaatgtatatgtccgtcaagtgggtgaagcactatcccaactaggatggcaggttgatatgtttagccggaaaataagtgttgaacaagaagatattgttcaacataattcccgctgtcgaaccattcggttaacagcaggacctgtggaatttgtaccacgagataacggatttaaatatttgccagaatttgtagaacagttattaaaatttcaaaaagaaaacggatttaaatatgagttggttcacactaactactggctatctagctgggtaggtttgcagttaaaacaaatccaaggaagtaaacaggttcatacatatcattctttaggtatcgtcaaatacaacaccatagaaaatattcctttggttgctagtcaacgtttagctgtagaaaaagaagttttagaaacagcagaaaaaattgtggctacaagtccacaggaaaaacaacacatgaaaacattggtttctcaacaaggaaatattgatattattccttgtggtacagatattcgccgctttggttctgtggatcgagaaactgcgagagctaaattagaaattgagccagatgctaaggtggtgttatatgtgggacgttttgatccacggaaaggtattgaaactttggtgcgtgcggtgcgggagtcgcagttttttggtgataaaaacctgaagttaattattggtgggggaagtacaccaggtaatagcgatggtagagaacgcgatcgcattgagggaatagttaacgagttggggatgggtgagtgtaccgttttccctgggttgttgaaacaagaaatattgccaacttattacgctgcggctgatgtgtgcgtgattcctagccattatgaaccttttggactggtggcagtggaagctatggcctgtggtacaccggtgatcgctagtgatgtgggtggacttcagtttagtgtggtgaatgaaaatactggtttgttagtaccacctcaagatgtagcagcgtttagtaatgctattgatagaattttaggtaattctgaatggcgtgcagagttaggtaagtcgggtaagagacgagtaatgagtaagtttagttgggatggtgtggcgagtcagttggattcgctttatactgaactgttgcaatctgtgaaagaaaaagagccagcgttggttgctggttgataatctttttgacgggtaaaggacaagtttttgatatcccctgggtttttaggggatatttttttgtttctcacgcagagacgcagagtacgcagaggagggaaaggaagagaaaaacaataaatttgctaaagtttaggtatactaaaaacggatgattgctagacttttgcccaggcaaaaatgtttgtatagcaatactcttagcgatttaaatagtaaggctgtaacccgtttttagtataaaaacccaagttgcgggtaataaaatgctctcttttagatagagatttaactggaaagaaagtcatcaaaaattgacttttgcaatgcagaagcaactgtcagtaataataaaattataagtatgaattaaaactgattagataaatgcttcttgaagagtgaaggcaaaaataaatgcctgaactttaagtaaaaacccttgataggtgacggcatgaatggatttgggaaaatcacttgtaatcgaactaaatacggtttcaatataatgacgagtgtgttgttttatatattgaatccaaggaggatcttgacgagtggatttctttttccgcatcactcatgactctacgactatcttcatcatgtccaatcgctttcaacaagtcatccgtgatagcatagatggcaattatttcatttaacggtgttgctgattttggggatgaaaacaatattgcatatattcaaaccccttgtagagacgttccatggaacgtctctacacacaaaaaacatcccgcatttatgcaatgcccatttaacatacacccctcctttttttctgactggaggggattttattactttattcacccactgccttcacaaagtacagccttagcgatcgctcttcctcataactagcaacttgggttattactttattgacccatttatttcccaaacttcaccctagcgatcgctcttcctcataactagcaacttgggttagtaccattaccagtgagcgataattgttgtaaattcatacctggtactatcagcgattcatagtaataggaaggaactaatttatcagcaattaatttcgtatcttccaagtcataaattaggtatgttctgattttttcccatccttgagaacctgcaccttcaccccaacaatgttgaatttcttggagagttaaaactaatctagcagattctcgcaatcccatttctatgactgcacttttgagggaatgttgatataatgccttattgacaaaatcccatctccgccagcaatgagggggctataatgtacctcataaccaaggaatccgctgtattaataaaaatcatcaaaatacctttattgatccagattgtgggatgtttatttaaatataaatcttgacttattgcgctatttgatcatagtttattacatattcgattacatcatttccctaaaaggattaaccccgaaaaatgtcttacaagttactatttgtctgccttggtaatatttgtcgatcgccttcggcagaaaatatcatgaatcatctgattgatcaagctgatctgaacaataaaatttactgtgattctgctggtacttctagttatcacattggtagtccacctgaccgccgcatgaatgctgctgcatctgctaagttaggaattaaactacttgggcaagctcgtcagtttcaaaaatcagactttcaagagtttgatttaattttggcgatggataaggataactatcaagatattctcgctgttgaccgttctggagaatatcaccataaagtccgtttgatgtgtgatttttgctctcaacacgatctcaaggaagttcccgacccctattatggcggaacagaaggatttaatcaggtgatagacctccttatagatgcttgttcaggtctgctagaatatgtgatcagggactggtgagtggtgactggtgactggtgactggtaaaaatcttttcttcccctgcctcctgcctcctgaactactctacaagaccatgcttgatggcaaaccgcaccagttctgcgcgattactggttaaagtttttctcaataaactgctgacgtatttttcaactgtgcgcggactgaggtgtagttgattacccatttcggcgttagacaacccgtgagtcaatagttctaagacttcctgctctcttgtagttaatgataatagcaactgagaattgacaattggtgttgataaatgattttgtccgtgtattgattttatcaggttagacccatctaaacattcttgataagagaagcggtattctgattgaataatttgcgatcgctctagtaaattacgaatagctgcggctaactcttctagttcaaaaggcttaggcaagtataaatcacatcctgattgataaccaagaattctttcttgggttttggttcgggctgttaacaaaattacaggtaacaacctaaactcagcttgttgacgcacccgacgcaccagttcatagccgttcatccttggcatgacaatatctgtcaccatcaaatcaggatggttcttttccaccatagacaaagcctcttgaccgtcatcagccatgatcaccgaatagccggacagttcaagataatcactgatagacagacgagtgccgaggtcgtcatccactacaaggatcttcaagggcatggacagtacacccctagcatttttcttactcaatattttgctattatatgcttaggaagtgttcataaaatttaatgttattttaaattttaataatgttataataataggctgaattaaatagaaaatataatgtaaaattcaattagtcgaaattcattattcaaattacaaatgttttaaacaacgaagtaaaacgactaagcaatatttaacataaagcagattttcaatgagtgacaaaaacgaaggttataaagtaattagcgacaatcgccaagctcgttatttgtatgaaatcctagaaacctacgaagcgggaatacagctggcaggtacggaggtcaaatcaatacgtgctggtaaagcaaatctccaggatggctatgcgttgattcgcaatggtgaagcatggctaataaatgtacatatttctccctatacctctagtggacaatattttaatcatgaaccgcgtcggactcgtaaattactgctgcatcggcaagaactccgcaagctaattggtaaagtagaacagcagggtttaaccttagtgccgttgaaaatgtatctgaaacgcggctgggtaaaagtcagcatcggtttatgtaaagggaagaaaattcacgacaagcgggaaagcctcaaacgccgtcaagatcagcgtgatattcaacgagcaatgaaaaattattagctaaatataccctgagcctgatttacagccaactctagattatagccgcagattgatttggcaaatcggaggaatagatacattggtgaatatccgagtcggtataaggcactttcaccatgaaacgtaatttcaccaaaaccattggcgctggagttctgacgctgacaatgggaattgtactcttaaatttacccgcacaagcccaagtgactcaacctagaacagacattgtaccagacaggactgtttattatgatcgtaacgatgttgattggggttggctgggattaattggcctgttgggtttagctggtttagccggtaaaaagcgtggagaagaaccaactcgttatcgtgatcctaatgcaccaggagctaccagttacagagactaacatcaacatcaattttagattttggattttagattttggattttaaattttagattttagattttagattttggattatgagtaagtgtttcataagcaaaacatctaaaatccaaaattgttagcttaggctgtcggttctgggtggacttgatttatttgaggagttaaaggagtccaatagctggcgactaaagcagccattaaccaccaaacggtattaacttcaggacgataccagacagtatctactgtgccatgagcgagcataccaagcaaagttgcgatcgccccaattaaccaaaatccatctttacttctcaagtttaggaaacggtgcatttgcataaatgccgtattcaagatgacaattattaaccacagaaaacaagctaaacccaaaaaacctgtttctacagccgtctccaggaaaattgaataggcactcaaagcagtataacggggacgttggtaaagaggataaactttattgaaagaattgtgaccaggaccgataccaataatggggcgatcgcggatcatctcaaaaacagcatcccagacattgcggcgaaaattattactactatcttgacgatctgcaaaaatactaaaaactcgcaaccgtacaggttcaacaaaaatcaccgccaacaccaataccccaatcaaaccccctacaataattggcaatgaccaagtgcgccaaaaaggtggcattgccacactccaccaataaaccaacaatgccattgcagccaaaagccccaccaccaaaccaatccagcccccacgactaaaagtaagaaccaaacaggctgtattaacaacaaacattgttagtgctaaagctttcctaatccaaccttgccaagcaaaaatagccaccaaacttaaaacaactgctggtagtaaataaccagctaataaattaggattacctaaataactgtaaaccctggtagttttagccaaactggattctggatcaacccaagtagccaatgctttagcgccaaaaaaccattgccgaattccatatacactgacaatcagagatatatgtaagtaaagagtaatcaaccaagaccgcaaacgggaaattctgagaactctagcgcatagaacaaaaagcaataaatagagtgttaacgttaccaaatcactcaacgcggcctttttcactggtgataaagctgtagctgccacagcaataaaccaatagagcaaaactagcagatgaattggcgtgaccgaagcggcatttgtcagacttgtatcatcagataaagtcaatagcacccataaccccacgccagctacaagcagcaaaccgattagggtactagaaacaaaaggtgcaaaagcatagataagactaagtagagcagccgctatcggatctccccactgcattaaaatactggtttgtcgccaaggacgtaaaatccccaccatcaaccgatgcaggtaactggtatccagatattctctgagcggtacagaggataaagtcaatctttgccagactaaattcataaacaaggttgtgatcaactagcacctaattgtagaacttagccttgatcttaatccggtaattggtaattggtgattggtgattggtgattggtaattggtaattggtaattcaatgaaaggattttggatgaaaggattttggattgtttttgtcaattccaatctaaaatctaaaatctaaaatctaaaattttcttccccagttgccagtccccagtccccagtcactatttagcggaattagccgttggcagtggcaaagaaattacatagcgatatcctgattctggagaaccttggatggaaatttggccgccatgtagttctgccatctgacagctgagtaacaaacccagtttttcacgagacagattcacagaagtattacctaaatccttatctgatctatcaaccaagattcctaattgctgctcaatcaaattggctgacttttcccaatttcctggggcattattcttattttctaaatcagaatcatacttttcagacttacccaagatttctgatatggacaaagaatcaagacgtaaataagagtcaatttcaccgtttccatctcctactcctaaccagggatgggaaacccaaatagtaatacagagcgtattttctttataagaaatatgaacacgaacaatactacccgtagtagaaagttgaataatgctaaacaacaggttatacaaaatttgtcgcaccttatctttatctaaaggccaaatgcgattgtgtcctggttctatagacaagcgaatttcttgattccgacggacagccacttctgatagagtgttgatagcttgttgacacagcatttcaatatctacaggagctaagttcagcacattagaattatcacttaatgttcctagttcggtaatttcattgactaaagacaataagtagcgtccactgtgttggataatctctagatattctcgctgctttgttgttaaaggcccataaatttcacgtgccagaacaccagccatccccagtacggatgttaagggtgtacgcaattcttgagttagttggcctaagagttctagtttcagttgctgagtagaattagaagtattttctagaatgggtggtgcgatttcccagtcaattgactgttcttctgggaatggcaagctaggaatacttgtattgggaatacttgtactgggaatacttgtaatagtgcttttttggaattgaccttgcaacaatcggttgcgttcaaattcactcatgcaccaacgagcaatgatttgcaaaaactcaatttctcgatctgtgaaattgcgtggctgacgattcatgactgccaatgcacccaagcagtatcctgaagcatcaattaatggcgctcccaagtaggaacggatgccatatttttggactaacttactggtagatattggtgtatttattgctgcttttgtatcattaataactaatgtttgagaattttctaccacctgagagcaaaaagaatcccgtcgtaataattgacgtttttgtgctagatcattcatgagacctaatcttgataaacccactgatgatttgaaccagtgaacttcttggtccataaatcccaaaatagaaatttctgctgccaaaaagtgagcagctgtttgagtagcttcttcaaataccggaattgtttctggttgccgtaaacccaagtctaacaatactctgatgcgttgttcttcttttgtgtctaaaccattccaaccatcattgggggcaaatagtttgttttcaggctctatcattgctactgctaccttgatacttgctacatactgtaagttgtgtaaccgctgggatgagcttgtcctaagttgacaatttactagacaaacctatataagtacatacaaaactacaagtatttgacgtatacatggaataagttgactaaaaaattaggcaaaatgtgtcagaattaaataatatagtatagtgttgacatcagcaaatgcttttatccatcaa

SEQ ID NO: 101 - DNA, 13680 bp, Sphaerospermopsis sp. LEGE 00249
  LEGE00249_120
acaaaaattgatcatttatcgcccgaatgcttcgcccgtaaagaagtcaggagtcgtaggggcgaagcattgggaaaacaacctgggacaaaaattgatcatttatcgcccgaatgcttcgcccgtaaagaagtcaggagtcgtaggggcgaagcattgggaaaacaacctgggacaaaaattgatcatttatcgcccgaatgcttcgcccgtacttacatcagaacaactttcaacaagtaaacaaaaaccgacaatgagcgggatggtaaattactgggcgatcgctattggcatcaatcaatatgagttatttcaacctttgagttgcgctcaaaacgatgcggaggcactaaaggattttttggtgacagaagtaggttttttaccgcaaaattgcctactgatgacaaatacttcaccaccgatagaggaaagatcctcttatccaacccaagacaatattctagttttattggaggaattagcagcaaaatcttgtcaaccagaggactatctatggtttttcttcagcggttacggtgtcaactataatgacaaagattatttaatgccggctgatggaaatcctgatcaggtgttagaaactggcatagctgtgaaacaactgatgcaaagtttccatgctgccaagttgaatgtattactaatatttgatattaaccgcgcctttggtacacaagctgatgctcccgtaggtcaagaaattattgacaccgccaaagaactagaaatggctgtcatgctttcttgtcaaccagagcaattttcccacgaaattagtgaactaggtcatggcttatttacaacagcattattagaagctttattttccggcaaaggtagcagcttaaaagatttagacacctatctgagttatctcaccccagaactatgtcaacatcattggcggcctcttcaaaatcctgtcattttcatccctgacagtcctccagtcatgattcccatcttgacattagataatgattcccaaaccgagccactgatttttcctgaagaaaactttgccgttgctacctcctcagtgacacagaaagagtctaaaaattcccctacagaaaaagcttggtggacggaaaataaaaccgtagaaactaccctcaacaaaacttctttacagttagatcagtctacaaattcagagacatctgttactaattcaactgtagatactaatgaaatcttggcaacttccccagaattaaacaccggcgctagatttattcccgctgctgctaaagactacgcccaacctgctattcagtcagaaactcccatttggaaacaatttattttgtgggggggcggtagcatgactatcgtcgctttaattacaacttttgttcttcgcaatcaggcgagttttcgcttccataaattatcagcatccctaaataatactactaataaacaggaattttcccagaatttacctcctattcctgctacggtggaaacaattcaaccacccacaacttctgtcgtttccaatttggattcccaacagcgtaatcaagcaattttagaactagagaaaatgtctctgagtccaaataaatctggtgatttgagtcaagcgatcgcctctgctcaaaaaatttcacccggtgaaccgctttatcaacaagcacaaaaaaatattcaggtttggagtcaaatgattttagatttagcccaggaaaaggctaaccagagagaatatattgatgctatagctactgcggaattaattaataaaaatacagccttttatcgccaagcaaaaacattaattgcaaaatggcaattagaagccaagcagtatttaagtaatcaaactttgttggatactgctaaagctttaattcgaccaggacaagcttctacttataaccgagcgattgaagtagcgaaaaaagtaccaccaggacaaccagggtttgaaattgcccaaacatctattaatcaatggagtgaacaaattttagaattagctaaaaaccgcgctgcacaaggagattttaacactgccattgccactgctactttagttcctaagcaaaccatcgcttatgaagacgctcaggatgccattgaaaaatggcgcaatcagtatactaggtgattggggattggtgattggggactggggactggtgactggtgactggggactggggaagaaaattttagattttagattttagattttagattggagatcacaaaaacaatccaaaatccaaaatccaaaatccaaaataaaaaactcctgcctcctgcctcctgccccctgcctcctgttgtatcacttaacaatattgtgaaatatcttcgccacattcatcagctagatagcacagggcgcgaaatcttaaacctacaacttcttcatataaaggattgagtttacacattgggggaatgtgaaacaagactttcccaaacaatttgacatcacgttcaaaaggacattgagggggaattaatctacacacccgatgagcaaattggcgatcgcctacttttaaagtatccaaccaatttcgcaaaggacgcaggaaatcccaacctgaatgagaatgagaagcctgtaactcggtgatattagctttattggtattattcgtctctgcttgatggagcgatacccagcttgtgaaaaaaatattttttgtggtactttcaaatgccttcatggttactcctctctgtttatgagggtattcaccttactgatgaatatacaatatgacaatcactctgtccgggagaatagtattttgacgaaaattctggaaaaagtgcgagtagctactgaaaatcagaatctgtgtattactacgtcaagttaaacttaatttccttaaaatgtgtactccacttagctaatctttttcataacttgacactctttaaattttaatgaagacctctatctttggacgggtttggctgtaactattacaaaacttaacatacttaatgtttataggtcaagtaacaattataaataggggttgctgagaaagtctttccgtgagggcataggagtcaggagtcaggagtcaggagtcaggagtcaggagtggtaggggcgaagcattagggcgactaattatcaatttttgtccaagcctattttccgaatgcttcgcccgtacaggagtcaggagatcaaggagtcaggagtcaggagtcaggagtcaggagtggtaggggcgaagcattagggcgactaattatcaatttttgtccaagcctattttccgaatgcttcgcccgtacaggagtcaggaggagattggaaaatttctttgccatctcttgaaatccccaaaaatgcacactttttccggtatacccttcaaaacccttgcactaatttctgtgtttatcagcctctaacctttgatatatcaaggttttaggtttattcagcaaaccctaattaagaagccacagcagtagaacgagtacgccgtcttctaccatcagaaaccttcacagcaggttcaggcggttgttcaggaacttgcagcaacaaagtcacagaagcttgacattgtaactcccgacgcagagaacgggccaactctttctctaaagtgccttgtaaaccgccccagtctatatcattgggttcatttcccgtcacaaactcagaccaacgaacccgcaaaatttcctcaatgcgttgctgtacccatttcaataacagcgatcgctcaatacttgtcaccacaccccgcaggtgaatttctggtctagccaacagtttaccattccaatcaacagcagccgcaatagtcgccagtccttcagaagccatcgtttgccgttcttgcaatactttggcactaaccattccagaactcgttgtatccaccagttcaatacccgaaggtactttagccgccacacggatagattcttctgtgagttctatcacatccccattctgaataatcaccatattttctttgggaatgcccatactctgagcagtttccgaatgcttcaccaacatccgatgttcaccatgaacagggacaaagaacttaggacgagttaaagccagcatgagtttttgttcttcttgacaaccgtgtccagaaacgtgaacgcccttatctctaccgtagaccacatgagcgccttggatcatcaatttatcaatggtgtttaccaccgcaatggtattaccaggaatggggttagcagagaaaacaactgtatctccttccctaattttaatatgggggtgttctttgttagcaatgcgagtcatggcggccattgactcaccttgagaacctgttgttaaaatcagtacgttctcatccggtaaaccccggacagtatgcaagggttgaaataggctatcttcacatttgatataacctaaattccgggcatgggcaatcaaatttagcattgaacgtcccacaactgttactactcggttatgtttcttggccagttgcaacactatattgatccgatgcacactggaagcaaaggtagtaacaaataaacgccctttagcttgggagaatacccggtcaaggttaggataaacggaacgttcagatggtgtaaatcctggtacttctgagttagtggaatcacttaacaagcaaagtacacctttttccccatgttccgctaggcgctgtaaatcaaacttttcaccatctacaggggtatggtcaattttaaagtctcctgtatggataactacacctaatggagtatgaatagcaacggtaaaactatcagcaatagagtgggtgttgcggatgtattcgacaaaaaaggccttaccaattctgacgacatcacgaggaagaacagttcttaattctgtgcgatcgcgtactcctgcttcttccaatttcccctctaacatggccattgctaatcttggtccataaatcacggggatgtcaaattgtttcaggtgaaaagcaataccaccaatatggtcttcatgaccatgagtaacaatcatgcctttgattttatggcgattttcccgtaaataagttgtatcaggtagtacaatatttactccgtgcatagcctcggtgggaaaagccaaccctgcatccaagaggacaatttcatcctcgtattcaaaaacacaggtattttttcctatttcatgtaaaccgcccaatggaataattttcagggctgagttagcttcgtttctagccattttctcctgtatgttgtgtgagttgttaatcagttgatagttagcgttcttgtatgaaagacaacatcaaatgtctatataattcaatgtcaaaatagccaatttccacttctgatattcaatcaatttggtattgaataaataaaagtaattgaccccgttcccgtagcttctgatcaaaaaagattcttatatcgttcagttgtagcacagatgtttaaattgcaacctagaagcaattattactttttctttataagtatccgggaaaccagcatctggctagtatccaacatattggcgctcagattaaaccgagtttatgtaacacatcttctaacttctgacagatttctgcgtcagcttcgcacagcggtggacgaactgaaccaacgttccaaccttgaagttttaatgcttgtttaacaggaatgggatttgttgttaaaaataaagctttaaacaacgggaatagttgtaaatgaatctcagtagcaatttgaatgttgcctacattaaaggactctatcatctgttttagttgattacctaccagatgagaagccacactcaccacgcctttagccccaaccgctaacataggcaaggttaaagaatcgtctccagcgtaaatctgaaattcctgtggtgtcaagcggcgaatttcactagcttgatctaagttaccactggcttctttaattcccacaatgttgtcgatttgtgctaattgcacaactgtttctggactcaaattttgaccagtccgaccaggaatattatataacaacatcggtagatcaggacaggcttgagcgatcgcctgaaagtgtttgtatagtcccgcttggggtggtttgttgtaataaggtacaacttgtaaagaaccatgtactcctattctagctgctttttccgttgctgcgatcgcttctttggtagaatttgaaccacatccagcaattacttttgctttccctgctacagattgcaacacttccacaaacagttgatactcttcatcccagcttaatgtcggagattcacctgttgttccacatatcactaatgtatctgtaccattgtcaactaaatttgctgctaattttccagctacttcatagttaacactaccatctgctttaaacggcgtgatcattgccgttatcactgtaccaaaatctaccacccgtttttcactcctgatttgttgttagttgttagttgttagttgttagttgttagttgttagttattagttattagttattggttattggtttattcatctttctttcccagtcaccagtcaccagtccccagtccccagtccccagtcaccagtccccagtcaccagtccccagtcacctacttatctttcagctttgatcttccaacctggtttaactacctgacgactccgggcaatgactaaagcttcattttccacatcttctgtcaccgttgaacctgcggcaatataaacatcattaccgatggtaataggtgcgactaaaacactattagaaccggttttggtgcgatcgcctattctggttctatgttttttcactccatcataattagcggtaattgttcctgcaccaatatttacctgagttcccgcagttgtatcacccaaataagaaaggtgtgcaacattagaagcatctcctaattgagtatttttcaactctacaaaattaccaattctgcaattttcacccacttccgcatggccacgcaaatgagcataaggaccaatacgagttcctgcttccacaaaactatctttgactacagaatattgcacagtgacattttcacccaactggctattttcaattaaacttccaggtcctatgcgactaccagatttaatcaatgttttaccccgtaaatgagtttgaggttcaataatcacatctggctgtaattctacagtttcatcaattgtcacactagcaggatcaataatcgtcacacctgccaaaagccatttttcctgaatacgtctttgcaaaatctcgtaagctgtggctaattgcaatctatcattaattcccagaatttcttggtcatcttccacatctacagccatcaccttacctacttgggtaacagcatcagtgagataatattctttttgggcattattattttgtaaatgtggtaaaaattttgctaaatcagaccagcggaaacagtaaataccagcattaacacggtgattttttctttgttcaggagtgcaatctttatcttcaactatttcctgtacaatgccgttttcatcacaaaaaactcttccgtaaccttggggatttgataaatgtgctgtgagaatagtacaggaattttgattttcttgatgaatttgtaataagtttttcagagttttagtttgtaacaaaggcacatcaccatttaaaattaacaaatccccagtgtaaccttctaaatgaggaagtaattgttgaatagcgtgtcctgtgcctaattgtacagtttgttccacaaattccaattcagaatttccacctaaagcagtttttacttctttagattgatacccaacaattactaacctgcgttcaggtgcaaggggttctagactatcaataactctctcgactagagattttccacccaaagaatgtaaaactttaggtagatgagatttcattcttgtgccttttccagcggcgagaattgctacaacaaccataattaattatcagtaaatgacaataaatgcttttttgactgggagattcaaggctaaatcatatcagttaattatctagagttgacaaagtctttctgtgtgggtgaggagtcaggagtcaggagtcaggagtcaggagtagcttcttcaaattcataatttctaaggtacaaccacaacttggttacgcccagcagctttagcaaggcaaagaacagcatcagcagtttgaattaatgctgtaccactagcactatgttggggaaaaccagtaactcccaaatatactgtgatctcctgactccttgatagcgacttgtactgagcctgtcgaagtaagcttggctttagccatactccttaatattcacaaaaggactttttcagcaaaccctaattagctgcatttctaagattgtaggacttacgcaagatgtgactgaaaaccttattcttgcgtaggggtaattcatgtagcttgcttcccgaagggtattacccctacgttcccttttgcgtaagtcctggattggtaaaaatctctgataatcttcataagttctatcgttggtaataggaatattctgagtttttacttttttcccctgtttatcaactacatagattgttaataattcaggtcatttgagtgttactaaaacattacttactgttaatatttctctttttctacaactatgtctttttgtcttgggatgccaataacctttggtttgatttattgctgtttcatgagccacttctgattgagaaagcttatgcaataacattacaatacattgacccgctaacactaatgccgcttctcttattttttcttctctttcttttacagttcgtccatcccactcttcgatttttgtcaaatctaaaagtttcttcacattttcttgaaattatgatatggaatctgttaaacttagatttgcatatatagcatttaccaattaccaattaccaattaccaattaccaattaccaattaccaaaaaaatatgaaattacaacaaaaagagataacattaaaaaaaataaatccacaacagcaaaaccaaactgagccacacttaggtttggtttgtatcactattgataaacaagtgcgttttcggactattacccggacccgttatttaaaactttctcctcaacaaagagaagataccctaaaagaactttatcaaaataatttgcgctgcttggatggggcgttaactttctgtcaaaagcaaaatattcgcctttatcgcatgacttcggctttatttccgatgagtgatatggaagataaaattggtggaaatatattagaagaaatgagggaagatttagcaaaaattggggagaaggcagaaaaattaaacatcagaatggtgttacatcctgatcagtttgtagtcttgagttctgataatgatgaagtcatagaaaatagtatcaaaattttaacaaaccacgcctacactttagatttacttggtttacctcagtcaccttgggcgttaatgaatattcatggtgggaaatctcaacgtggggaaaaattggtaaaagtaatttctgaactaccaccaggtattaaaaaccgcttaactttagaaaatgatgaatatgcttataatgctcaggagattttagaggtatgtcaacaagctggtataccgatggtttttgatgcacatcatcacatttgctatgaaaatttagattcttatgatcatcctagtgtagaatatgtggttttggcagcgcgagaaacttgggaaaatccagattggcagttagtacatatttctaatggggaaacaggttttaatgatagaaaacacagtgatttaattacagccatgcctcaagcttaccaccaagtaccctggatagaagtagaagccaaacacaaagaaaaagcgatcgctcatttgcgggattggtggttaatgcagaataattaacgttatattaactttacttaattagttgatcaataataaattgagaaatggcgatcgcgattgattttggtactagcaacacagttattactcgctggaatcccgttacccagcaaccggaaactttgactttaccgggtttatccctgcaacaaagtcttaatcccccactgattcccagtttagtatatgtagaagcagcgagtgaaagtaaagttttagttggacagcaagtgcgcgatcgcggtttggatctcaaagatgataaccgatttttccgtagttttaaacgcggtattggcgcagatattcagggttttttaccagaactagatggagaaatcgtcacctttgaaaaaataggtaaatggtttttaaccagggtaatcgaagaattaacactaatagaaggtggtttagattctttggttttaacagtacctgtagacagttttgaggcttatcgtcactggttaggcaaagtttttcaaacacttccagtagaacaagttaggatgttagatgaacctactgctgcggctttaggttatggtttaacagcacaagaaaatttgttagtaattgattttggtggtggaacattagatttatctttggtacgtttagatcaacaggtacaaactaatactaaaccagtaggatttttattaaagtggggtaataaatctttagcggaagattccaaacaaaaggtaaaaacagcccgtgtattagcaaaagcggggcaaaatttaggtggtacagatattgataattggatagttgattattttgtcaaaactaaagggttgccagttaattctataattactcggttagcagaacgagtaaaaattcaattatctacccaaaataaagccagtgaagtttattttaatgatgaaacttttgaaagttatgaattggatcttgaccgtcagactttagagaatattctcaaagatcatggattttttgataagttacatgataccatgatgaccttgttacaacaagcccgtcgtcaaggtatagaactagatgatattaatgcagttttgttagtgggtggaactgtacaattaccagtagtaaatacatgggtacagcaatattttgaaccagaaaaaatccgttatcaaaaaccttttgaagcgatcgctcaaggtgcattacaaattacccaaggtttagaaatcaaggattttctgtatcatagctatggagtgcggtactgggatagacgcaaccaacgtcatagttggcaaccaataattaaagcaggacaagcttatcccatgagtcaaccggtagaattagttttaggtgcttctagggaaaatcagccgagtattgagttaattttaggagaattaggcgcagaaaccggaggtacagaagtttattttgatggcgatcgcttagtaactcgcaaacttgagtctgtgacaactacagttaaaccgctgaatgatacagaagaagccagaaaaattgctaaacttacaccccctggttttccggggagcgatcgcattaaagtcatgtttcaagttgatgaacaacgatttttaagaattaccgttgaggacttattaacaaataataccctggtagaaaatcaacttgtggcacaattgagttaaggaggcaggagtcgtaggggcgaagcattcgggcgaccaattatcaattttatgaaaaggctattttcccaatgcttcgcccttacaggagtcaggaagaacggattttattttccctgttccctattttttcaagccttgctactgacaattacctgtaaactaccaccagcatataaaattggtttaccaacatcaaaaccagattctcttaataaaccaggtaaatcagtttttaataactgccaagctgtttccgtttcaaacaaccaaaaaaacactgataaaccaggccaaaatataggatttgtgggaggatgaaaatctactaaagtaaaaattccccctggttttaatactctataaacctcttggatgatttttcttaattgttcaggttgcatttcatgtaaagcggcgctagtatgcaccacatcaaactcatgatctgtaaaaggcatattttccgcataagcttctacataaatagcattcggcacattcttttttgcccgttgtaaagataaaggcgaagcatccaatcctgtaacattttgtgataatttcaccaaaaaagccgtagtttgaccactaccacagcataaatctagaatttgagaatctgagttgaggcttaaaccttgtaaagcgagttgacgaaaacgcccctcaccgcccacactcagggctgctaaccgggatatggcatcatataaccattgatagcggtaactcaagtctcgaaaaattgttgccattgcatatttccttaacgttaagctttatattgaataaagatatattgttaacattagtaaaaaaattgtaaagattgggggaaagtaactgctatgggtcgtgtaggcgtattattactcaatctaggtggacctgataaattagaagatgtgggtccattcttatataacctgttttcagatcccgaaattattcgcctaccatttcgatggatgcaaaaaccattagcttggtttattgccacacggcgagaaaaaacatcacaagagaattataagcaaattggtgggggttcaccattgcgaagcatcacagaagaacagggggaagcgttaaaaacccaattggatgctatgggtaaagaagcaaatatctatgtgggaatgcgttattggcatccctacacagaagaggcgatcgcccaactggcacaggataacattgacaagttggtaattttgccactgtatccccaattttctattagtaccagtggttctagtttccggttgttagaaaaactttggcaagaaaacccaaaacttcaacctttggaatacactgtgattgcttcctggtacaaacaaccaggttacttgcaagcaatggcggaactgatcattgagcaactcaatcaatttcccaaccctgatcaggcacacatcttttttagcgcccacggtgtaccaaaaagctatgttgtagaagcaggggatccttatcagcaggaaattgaggaatgtactcaattaattatgcaaacccttaatcgccccaatgcccacaccttagcttatcaaagtcgtgtcggtccagtggaatggctgcaaccttatactgaggatgccttaaaagaactgggtgaaaaaggcgttaaagatttggtagtagtacccattagttttgtttctgaacacattgaaactttgcaagaaattgatattgaatatcgggaaatagccgaagaagcaggaattgaaaacttccgacgtgctgctgctcccaacactcatccagtatttattcaagcactggcagatttggtaattgagtctttggaaaaaccggatctcaaactttcccaagttacccagatgaagaaaaaggtgaaaatgtatcctcaagaacgttgggaatggggaatgacaactagcgccgaagtctggaatggtagaattgccatgcttggtttcattgctttgatcatcgaaattatcaccggtcgaggcttactccatgctatagggcttttacagtaggtgacaggaggcaggaggcaggagatcaaggagtcaggagtcagcaaagaagcaggggagcaggggagc

SEQ ID NO: 102 - DNA, 13557 bp, Sphaerospermopsis sp. LEGE 00249
  LEGE00249_121
ttctggaccttgtgggccagcacccgggcgccgacctcgacctgggccgaaaccaccccgggcaccgcccggagggccgcttcggcccgggctgccagctcctcatgccaagaggcggcggcgtaaggcagctggaggacggccatgacccggccggcgtcctcgcccaccgagcggatgacggcgggggacagggcctccccggtgtgggggtcgggaatcgcggccagggccgcggtcaggagctcgttcgggatcacagggaaacgccggcgggaaatcggccggcatcttgccaccggcccggtccggggcatcaagaatttgcattccggggcatttgtttcatttgcattaatcgcggtccggtgttaataaatcgctcaggcgtctgaaccgatgccgaatcccaaaccggagactcctcgcatgtccaccaagcgtcacaagagcctcgcgcgcgtcccgctcgcgctggccgtcatgaccagcctctacggcccctacctgttcgcccagcaggccgagcaggccgacgaaaccactgaagaatcgacgcaggacggcgagcagcccaagcagctcgagaaggtcaccgtcactggctcgctcatcagccgcctcggcttcgacagcgtctcgccggtccagatcatcaccgctgacacgagcgccacgctcggccagctcgacaccacctcgatcctgcagacgtccaacgtcgccgccggttcgacccagatcagcaaccagttctcgggcttcgtggtcgagggtggtaacggcgtccagaccctgtcgctgcgcggcctcggtgcgaaccgcaccctcgtcctgctcgacggccgtcgtccgggcccggccggtacccgcggccaggtcggcgcgttcgacctcaacgtcatcccgagcgtcatcctgcagcgcgtcgagctgctgaaggacggcggcggttcggtctacggttctgacgccgtcgccggcgtggccaacctgatcacccgcaagtcggtcgaccgcacggtcgtgaccttcgacaccgacctgccggaacagtcgggtggttcgaactactcgatcgccggcgccaccggctgggacttcgacaacggcagcgtcgtcgccgccttccagtggtgggattccgagccgctgctgcgcgaagaccgtgacttcctgaactgcccgcgcgacctcgtgcgcaacgccaacggcacgatcatcgaccgcgttgaccgctcgatcatcggcaacacggcgcttggcggctgcaacaacctgtacgccaacacggtcatcgacgccgtcaccggcctgcgctacatcccgtcgccggacggctcgaccgtcggcccgatcccgggctaccgcccgcgcggcaactcgaacgcgatcggcggcaacccggcgttctaccaggacgtgctgaacttcgacttcgtcggttcgtcgcacgtcttctcgggccaggagcgcgccagcctgttctcgtcggctgatttcaccttcggtgacatcaactggaccggccagctgctctacaccaaccgccagaccgagtcgcgccagttccgccagttcttcccggcgatcgacggccgtccgttcggcttcaccggcgtgatccagccgatcatgccgttcaagtcggaccagaacatcgacgtcgactactggtacttcgcctcgggtttcaacggtggcttcggtgacacctcgtggggctggcgcctcgacaccacgtacagccgctcgagcggtgactacgaagtgctcgccatcaaccgcgacctgaccggcgacgtgcagctcgaccgcaacggcggcggcatcccgatcaactacctgtcgccggcgctgctcaacggctcgggcatgcagggcctgatcgaccgcatcggccagtaccacaccggcaacaccgtctacacccagatggtcgccaacggcaccatcaacggtgacctgttcgagaccccggccggcatcgccggtgccgccttcggcaccgagttccgccgcatctcgatcgacgacacgccgagcgcgttcgagcagtcgggcagcgcgtggggccagagcggcgcccagccgacccgtggcaaggactacatctcggaagtcttcggcgaagtcgaagtcccggtgctggccggcctgccgctggttgagcagctgaccttcaacggctcggcccgcgtgttcaagtacgacaccgtcgccagctccgactccgtgtggaaggtcggcatgggctggcagatcatcccgtcgctgcgcctgcgtgccaccaacggcacgtcgtaccgcgctccgggcctgtacgagctgtacctcggcaacctgaccagcttcgtcggccagctcggcatcgacccctgcatcgactggggcaatgccaccaacccgaacatccgcaccaactgcgccgccgcgggtatcccgtcgaactacaccggcgccggctcgtcggccaccatcatcaccggtggcggcctgggcgtcgtgaagccggagacctcgaagtcgttcaccaccggcctcgtgttcaccccggagttcgccaacgtcagcgcctcgctggactacttcgaaatcgaagtgcgtgaccagatcagcacgctgggcggcggcgcgatcgtcggcagctgctacgccctgccggtgttcccgaacgagttctgcaacctgttcacccgtaacccgggcaacgcgacggtcaatccgtacaacatcacgaacgtccgtgcttcgtacgtcaacatcaaccgccagctcgtccgcggttatgacctgaacgtgcgttgggatggcgacttcagcttcggcaaggtcgaagtcgaaagccagttcacgtacacgatggaagacatcgagcagctgttcagcagcgcgcaggccagcggtttcaacaacaacgaccgcaacaccgagatcagccgtccggccctcgtcggcagcatccgctcggcgctcgtgcgtggtgacttcacgtacacctggggcatgcgttacgtcgacgaaaccgacaacctcggcgtgggtggcttcgtcaccccggcgacgtacttcggcaacgccaacccggtgtacgacagcaaggccgaggctgcgatctaccacagcttctcggtgctgtaccgtcaggccgattgggacgtgctggtcggtctcgacaacgcgttcgacaagaagccgccgaccgtctcgacgggcaccgcgacgcgcttcggcaacaccccggcgttcgccacccagtacgactggatgggccgttcgctgttcgcccgcttcaactaccgcttctaagcggcagctgagctgacggaaaacggccgggttcgcccggccgttttctttgggcgcgaagggccttcacatgcctttctgcacatccgctgaacacggcttcgctccacactcgatcgtcgtcttccgacacgtcctcacctcgccactccagagaccccctatgcgatccgcagttctctccagcctcgccttcgcggcgatggccgcggcaggcggcagcgccgcccgcgacccgattcccgtcgaagctttcgcgaaaatgccggaaatccaatcgctctcgatgagcagcgatggcaagcgcatcgtcgcgctgatcggcaaggccgacgccgaggaattcgaaacctcccttgccacctgggacctcgacaatctggccgcgggcccgacggtcacggcctccggcgaccgcatgaagttcatcagcgcctcggcgctgaagtccgaccacatcttcgtcgtcggccgccaggagttcaccggcgcgatcggtgagtgcggcggcgaaggccaatcgatcggcaacaccaagaccttcgtcaccaaggcctacctcaccgacagcacgcagtcgtcgttcgatgaagccttcgccgacaagggccgcgccatgggcgtcagcgacctgcaacagcgctgtttcgaaatcttcggctcggcggggctggtgaaccagctgccgctggacccggagaacgtgctggtgcagcagaccaacatgggcacgctgcgcaccgactactaccgctacaacctccgcacgcaggccacggagctggtctaccgcgccggcggccgcgccacgccgggcctcttcgacccgcgtaccggcgacctgctgaccaagaacgaactcgaagccgtcggcgacaccttcgagcagcgcgtcctgatcaagaacccggaaacgggcgagttcgaggtgcatgacaacctcacccgcaagatcaatgaccgcttcgagttcaatttcgtcggtcgcgacgaggccaccggcaagttctatgtgctgaccgacctgttctcggacctcgtgcaggcgcgcatgtacgacccgaagacccgcgagttcgacgacgagccgctgatcgcgcacccggagttctcgatcgccaacatcgtcctcggcactcgccccagcgacttcaacaaggtcctcggctacaccgtcgccgcgatgaacatcgagacgacctgggtggagccgggcttggccgccatccatgaaggcctgaagcaggctttcccgggccagcaggtcaacgtgttgagctacacggacgaccgcaagaagttcctgttcagcaccgagagcaaccgccatccgccgcgttacttcctgctggtcgacggcaagcaggtgctgccgctgggcacggagcgcaccggcatcgacccgaacgacatcggcgaacagcgctgggtgacgtggacggcccgtgacggcatgaagatcccgggcattctcgacctgccggccggctggacgccggagcagggtccgctgccgaccatcatccacccgcacggcggcccgtggtcgcgcgacgtcggcggctgggacgcgagcggctgggtgcccttcctgacctcgcgcggctacgccgtgctgcgcccgcagtaccgcggctcgtccggcctcggccgtcgcctgtggctcagcggtgacgccgagtggggccagaagatgcaggacgacaaggacgacggcgctgcgtggctggtcgagcagggcatcgccgacgcggatcgcatcgccatcttcggctactcctacggtggcttcgccgccgccgccgcggtggtccgcgagaacagcccctacgcctgcgccatctcgggcgcgccggtcaccgacctcgcccgcctcggcaacacgtggagcgagaaccgcctgcagcgcatcgtccaaggccagaccgtgaagggcatggacccgatgcagaacaccgacaaggccaacatccccgtcctgctctacgtgggcgaccgcgacgtccgcacgccgtcgtggcacgcgcagaacttctacaacgcggtgaaagacaaggtgccagcgaagttcgagctgatcgccgaccagccgcacagcctgccgtggtatccgcgccaggtggaccagggcctgacgctcatcgagaacttcctcaacaacgagtgcaagatggccacgtccaatcgcactccggctggcacctcgaccggccactgatccccacacattgttggaatccttcgaagcccggcctcgcgccgggcttcgtcgtttggggccgcgccgcatcccacacaaatctttcacactcctgctagcctctcccgagggttcgtcactgtgtggggacacaaaggacggacgccttgaccaccacatcgaatggggagattcgaatcatgcagatcaggaagcacccggctcgttcaccgctgttcgtcgccacgctcaccgcgctggccttggggatcagcctcccggccctggcgcagaacgcgtccagcaccgacgacgacgcgacggagcgcgaggcgaagcggctggaggccgtccaggtcgtcggctcgcgcatcaagcgctcgacgatcgaagggccgtcgccggtcacgatcatcagcaacgaccagctgcagcgcgagggcttcgtcaccgtcgcggaaacgctggagaccatcacgcagaacgcgggctcggtccagaacgaattgaactcggccggcggcttcacgccgaacggcgcgccggtgaacctccgcggcctcggcgccggccgcacgctgttgctcatcaacggccgccgcgcggccgactacccgttcccgtacaacggccagagcaacttccagaacttcaacaacatcccgaccgcggcggtcgagcgcatcgagatcctcagcggcggtgcctcggcgatctacggctccgatgccgtcgcgggcgtgatcaacgtcgtgctgcgcaaggatttccgcggcgacgtggccaagctgcgcacgggaacctcgaccgaaggcggcggtgatttcgccgacctgcagtgggtcggcgggcgcaccggcgaccgctggagcctcacctacgccctgcagtactacgccgatgagccggtgtacgcatcgcagcgcgacttcatggattcgcgcctcgacaatccgctgccgccggacatcgtcggcatccagccgggcgccggcctgcgcatcaaccgcatcggcctgcccaccggctcgacctcgttcatcgcgccgccagcgggcacctgcgcccgcttcggcggcgaatacgtcgactggacctaccgcgccgtcaacgccgccaccggcctgccgttcacgcagggcaacgcctgcggctacttcaacgacgtcggctaccagtccattgccaacggcaacaacgacctgtcgggctacctcttcggcaacctcgacttcgacaacggaatgcaagcctgggccagcgtgatgggcttccagtcgcgctcgaagctcacgggcggcgtcgagttcatcagcggcccgcacaccgacggcgtgggcgtgaccagcacgttcttcgcgacgaacccggagatcaacggcaacgtccagatccagcgcatcttcacgccgcaggagtacggcggcatcgaagggacgttgcagcgcttcaaggagtcctcgctcgacctcgccttcggcctgcgcggcacgctcgccgatcgcttcgactgggaagccacggtcggtcgcgccgactaccgcgcaacccgcacgcgcccgcgcctcgacggctccgcggtaaccgacttcttcttcggcccgcgcctgaacaccaccggcacgccgcgtcacctgctgaacctcgagcgcttctaccggccgctgacgccggcggagtacgcttcgatctcgaccaacctgaagtacgagtcggagtcgtacgtcaaccagggcaacgtcgtgctgagcggcgagctgttcgagctgccggccggcgccgtgggcttcgcgacggtcttcgaagtcacccagcagggctacgacctcgattcgccgccggaaatcctgccgaccaaccgcctcgcctacaacctgacgggcaccaatggcggcggcgatcgcgatcgctacgcgatcggcttggaaaccagcctgcccctgctcgactcgctgcgcgcgacgattgccgcgcgctacgacaagtacgacgacatcaccaacgtggacgacgcccggacctgggcagcgggcctcgaatggcgccccttcgactcgctgctggtgcgcggcaacctgtcgacgagcttcaaggcgccggacatgcactacgtctacaacgagggcagaggcagcttcagcaacgccctcgacaccttccgctgcctgtcgaccggcggcaccccgggcacctcgacctgcgcgggcgccatctacacctactcggtcttcgcgaccagccgcggcgagccgacgctcgaggaggaaacgggccgctcgttcaccggtggattcgtctgggatatcaccgacaccatttccgcgtcggtcgactactacgacatcaagctcgagggcgcagtcaccaacctcacatcgacctacatcctcgacgccgaggccggctgccgcacgggcctgacgcgtacgcgccagccctacgccttcaacatcaactccggcttctgccaggagatcatcagccgcgtgcagcgcgcccccgcaccgggcgagccgaccgaccgcatcaccggcgtccgcagcggcccggtcaatcaggcctaccagcgcatcgacggcatcgacgcgtcgctccgccaccgcctggagaccgccagctggggcacgttcgccttcagtctcgactggtcgcacgtgctgaacttcgagctgcagagcttcgcaaccgatccagtgcaagcggactggcgcgacgatccgggcaacttcgatttccgcagccgcatgcgcggctcggtggcctgggcgcggaacgactggacggccaacgtcttcgccacccgctacggcagcgtgcccaactggcaggaaaccggacgcatcgcgccctacatcctgtggaacgtgaacgcgacgaagcgcatcaccgagcaggcctccgtgggcctctacgtcaacaacctgctcaacaagttcgcgccgcgggatgacgggttcaacagctatccgtacttctggcgcgcgttcagcccgatcggccgcgaggtctccgtccagttcacgtacgccctggactgagccggcacctccggcacctccgccgcccccgaagcccggcctcgcgccgggcttcgttttcccggggccttggccgggactcaggcgccatctgcgataatcgccgcctgccttcaccgcgatgccgatgaccacctccgctgcctccgcggcgcgtcccgcgcccgccctcgtcaccaccgccctgccctacgccaatggcgagatccaccttggccatctggtcggctacatccaggccgacgtctgggtccgagcccggcgcatggccggcggcaccacgcatttcgtctgcgccgacgacacccacggcacgccgatcatgctcgccgccgagaaggctggcaccacgcccgaggccttcgtggccggcgtgcaggcccgccacgagcgcgacttcgccgatttcctcgtcggcttcgaccactacgattccaccaacagcgcgggcaaccgcgcgctgaccgaggcgatttacctggcgctgaaggcgaacggccacatcggcgcacggccgatccagcagttgtttgaccacgtgcgggaaatgttcctgcccgaccgctacatcaagggcgaatgcccgaactgcggcgcggccgaccagtacggcgacaactgcgaaaactgcggcgcgacctactcgcccaccgaactgaagaacccgcgctcggtcgtctccggtgccacgccggaattgcgcgagagcgagcaccacttcttcgagctcggccgcttcgaggccttcctgcgcgagtggctggccggcgacgtcgcccatccgggcgtgcgcgccaagctgatggagtgggtcgattccggcctgcgcgcctgggacatctcgcgcgacgcgccctatttcggtttcgagatccccggcgcgccaggcaagtacttctacgtctggctggatgcgccgatcggatacttgtcgagcttcaaggccctctgcgaggcgaagggcctcgacttcggcgccttcctcgatgccgcgcgcaatgcgaagggcgagaccgagctgcaccacttcctcggcaaggacatcgtcaacttccacggcctgttctggccggcggtgctgcacggctccggccatcgcacgccgacgcgactgcacgtcaacggctacctgacggtgaacggcgacaagatgagcaagtcgcgcggcaccttcatccaggcccgcacctatctggatgccggcctgccgccggaagcgctgcgctactactacgcgctgaagagctcgggcggcgtcaccgacctcgacctcaacctgcccgacttcatggcgcgggtgaactccgacctcgtcggcaagttcgtcaacatcgccagccgctgcgccggcttcatcgagaagcgcttcggtggccagctcgccgccgagctcgacgatccggcgatggtcgcccgcttcgtcgaggcattggacgcggtgcgcggccactacctcgacgacgacgcggccgccgccgtgcgcgcggtgatggcgctggccgacgaagccaaccgctacgtcgacgagaagaagccctgggtcatcgccaaggccgagggcggcgacgccgagctgcagcgcgtctgcacacagggcctcaacctgttccgcctgctggccatcggcctgaagcccatcctgccggcgctgtgcgcgcgtgcggaaggcttcctcgatgcgcccatcaatggctgggccgacgccgccacgccgctgctgggccgcgccatccgcccctacgagcccctgctcacccgcatcgaacaaaagcagatcgacaccatgatcgacgcctccaaggattccctcgccgcagccgcggaagccgcgaaggccgccactgcaactacggcgcccgccagcgtcgagaaggccgcgaagcccgccgctccgaaagccgaaccggccaagcccgccgccggcgacgcgccggccctcatcggcatcgaggacttcgccaagctcgacctgcgcatcggcaaggtgctggagtgcggcttcgtcgaaggctcggacaagctgctgcgcttcaagctggacgccggtgagctcggcgagcggcagatcttctcgggcatccgcgccagctacggcgagccggagaaactcgtcggccgcagcgtggtgttcattgccaacttggcaccgcgcaagatgcgcttcggcctgagcgagggaatgatcctctcggccggcttcgagggtggtgcgctcaccctgctcgacgcggacagcggcgccctgcccggcatgccggtgcggtaagcggccatgaccgatgccctgctgatcctcgtcggcgcggtgctggtcaacaacttcgtgctggtgaagttcctcggcctgtgcccgttcatgggtgtgtcgaggcagctggatgcggccgtcggcatggcgctcgcgacgggcttcgtgctgacgctggcggccggcctctcatgggcactgcagcactggctgctggatccgttgggcatcggcgacctgcgcacgcccgccttcatcctcgtcatcgccgccacggtgcagttcaccgagttgctgctgcaccggcagagcccgcggctctaccaagtgctcggcatctaccttcctctgatcaccaccaattgcgcagtgctgggcgtggctctgctcaacgtgcagtcgaagcattcgctgctggaatccgtgctgttcggcttcggcgcggccgtgggcttcggcctcgtgctggtgctgttcgccgctctgcgcgagcgcctggaatcggccgaggtgccggcggcgttcaagggcgcgccgatcgcgctggtgacggccggcctgatggccctggccttcgccggtttcaccggcatggatcgctaggccgcgccgtggccgacctctggcttcccctgatggcactggtggcactctgcgccgccctcggcgccctgctcggctgggcagcgaaacgcttcgaggtcgaaggcgatcccctcgtcgagcagatcaacgccgtgctgccgcagacgcaatgcgggcaatgccagttccccggctgccggccctatgccgaggctatcgccaagggcgaggccgacatcaaccagtgcccgccgggcggcgaagcgggcatccgcgcgctggcgacgctgctgggccgcgaagcgaaaccgctgtccgccgaacacggcgtggaaaagcccccgcaggtggcgcgcatccgcgaggacgaatgcatcggatgcttcaagtgcatcgctgcctgcccggtcgacgcgatcatcggcgccccgaagtttctgcacgtggtcgtggaagacctctgcaccggctgcgaactctgcattccgccctgcccggtcgactgcatcgacctcttcgccgcgccgccgccctcgcgctacagccgctcgacggtgtagcccgcggcggccaactgctgcaccaggccttccgcaccgagcaggtgcagggtgccgaccgcgaccagcgcatcgccctcgccgggggcgtccagcagggccttgacgcgtgacacccaagcagcatttcgctgggtgttgatgcgctcgtacagcgccgggtcccgcgccttcatcgccgcggccatgccccaatacagcgcatccacgtcaccctcgcgccactgccggtgcagccactcggtctcgctgcggatctcgtcggagcgctcgaccacgtcgcgcaactgcgcgacctgcacgccgtacttcatgccatcgaaaagacgaatctggtctgcgggcgtctccagccccgccgtgcgcttgccgtcgcgggtagcgcgttgggcgagatgcttgtcgagcccgagcgccggatcgaggccggcagccgtcatctcggccatggtgagcgtcagcgcggcgaaccacggctccatccgctgcagggcgtcgagcggcagtccggcctccgatgccagttgcacggtcgccgcccaggtcggggcatccatcgtctgctgcaaggtccggccgtccgcacggatgcccgcctgcgcgaacttcagcccgaggctcgggtcggccaaggcttccggcgaaagctcgaagaacacctgctccgcgtcatcgagcgcggcgtacaccatcggatcgagcggataatccccggcctccagcaggtggaaggtgcccagcaggtacaccacgttgtcgccatcgctggccttccacagcagcggccgcgggggcccgctggccgcggcggctgtcgcgttcgacgccatcgccaacgctgcggcgaacgcgaacgccctccaaccgctgcgattcgccatgctcagggcgatgccagcaagggaagcggcttcttctcgccggcttcgatgcggaggtcgaggcggttcgacggcggcggcatcgggcaggtggagaactcggtgaatgcgcagggcgggttgtacgcgcggttgaagtcgaccacggtcgttccgccgtcggccggccgctccgcgtagaggaagcgcgccgcggcatagctttcgtgaccgctcgtgcggtcggcgaagatcaggaacaggcgcccgtcaccttcgtccaccgcctccagccggtactcgacgccgtccttctggaacaccacgacgcccgggttggccatcgcttcttcgatgccgaggacattgacgatggagatcgtctggcccggcggatgggctgcaaaacgcgcgtcgaaacggaaggccgcatcgatgtcgaagtaatcgaggccagggaagcgcgtgcgcgtcggcgccaaggcatcgcggacgcgcagcccgtagttctcgccgcgcttgatgacgatgaagctggcatcgccctggttgaagccgacgaccgtcggcgtgccgccctccgcatccgtgacgagccggcgcgtgccgccatccgcaggctggccgtcgtacatgacgcccgccccgcgggtggcgcggaacgtgaccgtgccatcgcgatcgagccggatcatgccgacctcctcgggccccgcggccagacgcacgcccttggtggcgccgctgccgacgtagc

SEQ ID NO: 103 - DNA, 13532 bp, Sphaerospermopsis sp. LEGE 00249
  LEGE00249_122
ccagtccccagtccccagtcaccagtccccagtcaccagtccccagtcaccagtcaccagtcaccagtccccagtccccagtccccagtcaccagtcaccagtccccactctcctatttaaccgtcaccattaccaaatcgcttgattaaatcttcaggacgaagattagaaacaaattcccggaaagcttgttgttcagcttcatcagcatcacgatcaacgggaatagaagcatctgctaccacttcttccatcacccaaatcggtgcatttgtccgtaaagcaatggcgatcgcatcactaggacgagaatctatttctttttttacctctccttgctgcacaattaaagcagcgtagaatgtatccttttgcaaagaatgaattatcaccttttctaaggtcatattccatgcttccaaaacatttaccatcaagtcatgagttaaaggtctagggggtttttgatgctccatagcacccataatcgccctagcttgatcctgaccgatataaattggtaaagcccgacgatctgaactatctttcaggagtacaatcggactacgggttatggcatctaaagctataccagcgactctcatttcaatcattggccaaccctctaaaatccttgtattgcttgagtgctatgtggcaaaaaatacccttgattgggtttttctaagacagaagtaaacatagggcttttcttctttataatcgcttctattaaactgctacataaaacccagataatctggactttactcctgattttattggcaaaatgagagcagtgatccctgtttcagcttaaacgcctatcttttgggaagcgagttatagccaaatacgagcaattattgtccgatatgtggcagtatataaagctttatcggaaaattaatctccaccggatgactcctaacttgtagtaaacaccagagtaagtcaaaatgctctcctcaaatcataatcgtcttatccaagtatgccttgagattgatgttaatgtgtgactgttcagccttcaaaaaaaacttcagaaattatctttaaatgttttacgtttttgttcggaattatcagttgatttcagccaaaattaagcaataggtgattggggactggtgactggggactggtgactggggactggtgactggggactggtgactgggaaagaaaattttagattttagattggaattgacaaaaacaatccaaaatccaaaattgtattaccaattacccattaccaattacccattactaattacccattaccaattcttagcaaacttgtaaataaagttaatttggcaaaaaatcatgtttacaggattaattcaaggattaggtaaaattaaacccttatctaacgatttgtggcagattacttttgtcagccactcggatgccattatgcacgatttaacttatggcgatagtgtagcagtagatggcgtatgtctgacggtggaagaaattttaaaagatggttttattgccactgcttcaccagaaaccctgcgtcgtaccactttagggagagaagaaacccaagccagatatgtcaacctagaaacgtcgctgcgagtggggggtaaggtaggaggtcattttgtcatgggtcatgtagatgggatgggtgaactcattttagcggaacagacagcgacctcttgggaaatgacttttgcagtaccggaggcgatcgctcgttatatcgtccctaaaggtagcatcgccatcaacggtatcagtctcactgtagccacctatcaacccgaacactcacagtttacagcagccgtcattcccctcacatactcggaaacaaacctgagttgtttaagttctggtagttgggtaaacttagaagccgatatcctgggtaaatacgtggaaaaattcatttccccaggcaaaacaccacatcaagaggacattacacccgcattcttaatagaacacgggtatttataggtgactggtgattggtgattgggaaaaatataactgattacccagtccctagtcacctgtcacctgtcccctatctggcctgtgctgttctgttgttgtacaccaagttatttaaacctgcttgtaacttcacaccggggtcaacagcaacccaaccgttgggtgtgaggtgacggacttcaaaatgcaggtgaggtcctgtagagttaccagtgctacccacacgaccgatcaccattcctggttctacccactgaccaggactaactaagatgtctgacatatgagcgtagagagtttgttgggcagaactgtgattaataatcacggttaaaccgtaaccaccaatccagtcagcggtttctacttgacctctagccgctgctaaaattggtgtacctgtgggcgctcctatatctgtacctgcatggaaacggcgatcgccagttataggatgtatccgccaaccaaataaagaagttacaggcgcagcaaaagataagggaaaagctactcccgaactaccaccacggtaagcataagcaaaggtgttactgtaaggaacttgtggtaaaaccgctgccagggcaaagtcataagatacattactcggacgtggtgctatattatcctctgccattggtgctggtaaactaccaaagctgggggcgatgggtgtagcattgacggttgtagttggggaaaactcgctgggttgaggaataaaccgattcggacgataggcggtttttgtagaactgctggtatttgtttgggcagtacgccaactttgattattattgacagcagtagcaaccgtttttactacattgcgggcttgtgagttagactgagccgctacttgcggtgtttttggtgttttttctaaactagcggtttcactttttttgatccaactaggtgctgattttttgggtgcatcagctacggtaggggtatcagtggcttttttaccacaagcaccagcagcaatttctcttttagaaaaaactgcttcacaaccgctagacctttctgtaacaactacagaactgggtggttcatagttgttagttgcagtcccattgtattcggtggggtcaatctgggtgttattgtaatctttggttttcctcgctgtggcgctgccagtatccccagcattattatttgctggtttagctacttctgcgggtttctcaggtgctgagttaacagaagtctctggttttttcacctgtgacgtttccgctttcggttgagaagttttaatgatgacaacaggttgagaattttctgctttcggttgagactgtctcaccggttctactgtttgggaaacttcttgattattgagtttctttttcagtctggctctgcgttcagcaaaatctggtgttgattttactgcttctggggcagcagtttcttttttttctgtctctgcaactgctgtcggttgggaactttcaatagtgggaacaatgttatctactgatgattccgtttgagccaacacaaaaccaccacttaacaggctaacactactcaaccaagtcagggcttgggctggtaatgtagaagcaaagcgttttgttgttaaactttgagttcgcttattattcaagcggttatgggcagatttatgaggctgcgtcattttttctctcagttgtgtgtaataagtttaaagaagatgatgtgcttaaaaagttaaacagaaattaaacagaaattaaacagaaattaacaccgaagattaagagtaacccaaactgattgtaccgggttctacagaaatttctgcttttatcagttctgtcctattatattcagccatttgtaagcggagatttccttcgggtgtcaccccaactacagtgcctaagagattattgacatacacatgatcaccaatgtttgtcagtaaatgcagataacgagacagtagtatgcttattccttcgttgtttagacactctagaccggactgtattcccagtaaaacttgagcagtgagcatttctagcccagaaatagcttgatcattctgggtagtttgccaggattttaagttgatgccagtttctggtactgggttagcccagttgatacctacaccaatcacagcttgggtaatatgcccttgaaaaaccctggtttctgttaaaatgccccctagtttgcgacgatttaatactaaatcattcggccattttattcctactgttatgccacactttcgtaagtgtgaagcaattccccaagcactagctaaggttagttgatagctattggtgacttctagttgaggagcgatcgccattgaaaggtataaaccacccgcaggagataaccattgtcttccccattgtcccctacctgcggtttgttgggtggcaatcactacagatcctggttttgctccttgggcgatcaagtcccataccatttgattagttgacgggagactgtcaaaaatgtgtagagaaaatggtatacatggttgcttacgccctaagtgtaagaaattttctaaaagttgccgatcaaatttcacagttattcccctaaatcccgttgatcaagttagcattgattggcggttttgtattttttgtttgggtttgtttgaaaatgcacacttggcactggcacaattgggaaggtctaccttacctgacttgtaatcttttgacaccttggcctcatggtttttttacccagcagttttggccacgtccaccgcaggagttaacacaggtactgcaaccagaagctgctgcttatcgtttaaaacaagttcacggtaatactgttttgactccccaagaggtagatgaacatttaaacaacagcaatgatgagttggcgttagcagatggtttaatcagtgaaaaacctttacaggctgtttgggtggcttctgctgattgtacaccggtgctgattggggatgtcaaaatcggacaggtagcggctttacacgcgggttggcggggtacagcagcgcagattgttccccaagccattaaaaagatgcaatctcaaggtagcaaactggaagatttacgcattgctatgggtcctgcgatcgcaggtgaagtttaccaagtttccgtggaagtggctgcggaaattggaagcactattataccacataatgacccagaaaaaatagttgctgctttacacgatttacctgattcacctttattaccggatgcagaaccgggaaaggtgcgtttagatgtgcgtcgtgttaatgctttgcagttagagcagttggggtttagtggagaacaaattgcgatcgctccttactgtacctatcaatcttctgaacacttcttttcttatcgtcgagaaaaggagaaaaaggtgcaatggtcaggaattgttagtttatcttaatttcctgtcagtagtaacataatgtttgatgtgttaccgttgtattgagcatggcattagcatttctatttagggtttgctgaaaaagttatctgtgaaagctaggtgacaggtgacaggtgacaggtgctaccccacggtgacagtttcaagagttggataggaacgattttttctttaagagggttttgtgttaccctgctttcttctctagtatctgtcacctagtttatccccaaactatttgcaaattcaaaacaaaccccggtaaaacatcttcacctgataattcttgaggaaattctaatacttccactggtttaccaagacgataaatttccacttgacgcattttacgattaatcaaccaacctaatcttacttcattattgatatactcccgcattttttcctgagtttcttctaaactatcactgggtgacattaactctaaaacaaaatcgggtgcgattggtggaaacttttcctgttcttccagtgtgagtgcatcccatcttgctttttttatccaagctacatcaggagaacggtttgcaccattgggaagtttaaaacaggtggaagaatcaaaacaaactcctagtttattttgacgattccaaaaaacaaaatctgccgaaatttcaacattacgttttcccgttcctcctcctgtgggtgacataatctgtatttctccttttgcatttctttcaaatttaacttcaggattttctcgacacaattgataaaattgatggtctgtgagttggataataggatttaagttgacggtgatcgctgtcataattatctctggggatatctctgggaatatatatcaactcggatctcaataataaatgaacttggtatgatttggttatgctacttaagaaaatttactttaaagcatcctttaataaatccctatgcaaaaacgccccattgactaaagattgtattttctccgatgacaaagcattaccattttgataaaaatctaaccaatttttactaattaaatctacatcatcggggatattttctaaatcccatccaggtatttgtaagtcttccattaatctgtttatcttgggatcataactcaatgcaaaacaacgacaaccttcactagctgccataattaaactatgtagacgcattccaataaccatatctacaccctgaaatgcaccttttaaaatttccggtgcttctaaacaaagaatctgactattatctgttaattgcagttgaattttttcggcaattcctaaatcttcgcttttttgaaatggtaatattaaaataaaggcttgggtagctgtttgtaactccaccaaagcacgagttaaatttgctaatctagtttctgtaagttggggatgatttcttaaagtaactgcaattcttggttttggtaaatctgctaattctgctactgactgcgactttaatgcccaaactggatcaggtgcaagaatatgtggtatattccaatttgataataaagccgaactagagcgatcgcgtacactgacttgaatacaaccagcaaaatttcgctttgctaaccagcgagtttgcggacgcaataaaggtcctattccctgtccccaagctatagtttttaattttaggacttgagcgatcgccattaatccgccataataaaaagggctaatggtactagtcacatcctgcattaaactaccaccaccccaaatgaacgcatcacaggaacgtaaagcttgaattacctgtaaaaacgccatgcggttgtaactttccacaccataacgccgactcgtttcttcaggatttccagaaagcactacaggggtgacatgaggtggtaacatttgcaaaagtgtagctaacaaagcttcatcaccaccattacctttgccgtaatacccagataataaaacacgcatcttcaataattttggattttggattttggattttggattttggatgttagatgttggacttaggccgtaatcatggaaaaataaaccgcaaaggacgcaaaggacacaaaggaaagagggtttgtgaggtattctacgtaagtcctgatattttagattttggattaccaattttttaagtggttatctacgactgacaactaatagacaactaataactgattactgactattatgcacgccctttcgattcccacctggattattcacgtttctagtgttattgaatggatagccgctatttggttaatctggagatacggtgaactgacaaaaaaccgtagttggtggggattgtcctttgccatgttaccagctttaatcagtgctatgtgtgcttgcacttggcattatttcgacaaccccgaatccctagaatggttagtcaccctccaagctaccatgacattagtgggtaattttaccctttgggcggcagcagtatggatttggcgttctaccaagtctgcaaccaaaattgaagcaaaaaccatcaaatcagaaccatgatatcaaaagaaaccctctttgccctttccttgtttccctatttgggtttcttgtggtttattagccgtagtccgcaaatgccacgtttatccctatatggattttacggtactttagtatttgtcggtgttaccattcccgccggcatctatgccaaagttgcttatggagaagctttagccaatatagactggttacatggaggcgctgaagtatttttaaccctcgctaatattttagtcgtcttaggttttcgccaagcagtacaaaatttagggaataaggaataggtgataggtgacagggggagcgaagcgattttgtgagatcgggttttaattctcaattaaattacctaattctcaataaaaacacattttctgccgcgatcgcacccctaaataggggttgctgagaaagtctttccgtgagggcataggagtcaggagtcaggagtcaggagtcaggaggagatttgaaaatttctttgccatctcttgaaatcccaaaaaatgcacactttctccggtatacccttcaaaacccttgcactaatttctgtgtttatcagcctctaacctttgatatatcaaggttttaggtttattcagcaaaccctaaataggggttgctgaataaactgaaaaccaccatgaataaagagtttgagggtgataacaaagaacataggtgattagcacccgaaatttaagcacctcacaaaatcgcattcctccctgtgaatacttatgtgcagatgatttttttgtctctctacccccctgcataagctgttacacagctaaattgtataatgctaatattctgaactcttgtggaacaggcaagatgcctgttccacttatacaaattaaatgcacaacagcttaacttcttctttttgtcaaatttcatgttaagaaagatgtttatagggggttaggggggatctcaattcctaaccaaaaatacacccactacgcgcaggaacattcaaatcaacactctgattattccactttatttccccatttccaaacaataaattttgcaatttattttctaatttcccaccatcaaaactcactgtaaccgactcctcacccacatttactgcaatcattaactcctcattttcccaaattcttataaacacatacagcgtactttccgcataaataacttgataacttcccaccctcaaagcttgatattgattacgtaaagaaattaattgtttatgggttttcaaaatttgcaaattccaattagcttctaaaggaaaaccacgacgacaatcaggatctaaagcacctggtaaacccacttcatcaccataatatatactaggcgctcccggaaaagtcaataataacaaagttgctaattctaaagatgcaacatcaccacctgcaatagttattaatctcgctgtatcatgacttgctaataaattcagttgtgtaagttgaatttcccaaggataaagtgtcaataagtcctctattttctccgcatattcagcagcaaataaaggtggaaaaggtttataatcacgtccctttaccatttctaaatctacacggtttcccgcagtaaaagcaatagttggacccgtaaataaataattcattacaccatcaaattgtgttccatccaaccactgacgggaatctgtccacacttctccgacaatataagcatcagaatttatggcttttactcgttgtctaaattcttgccaaaaaccaggagttttaatttcaaaaggtacatctaaacgccaaccatcaataccaaatttaatccaatattcggcaatttccataatatattcccgcacttctgggttatcatgattaaacaccggtaaagaacgaatacccgcccaactttcataatttgcaggtgcattacccgtataaggtgcaagtggccaaccttgaattttaaaccaatctacccaaggtgaatgaggtccattttctaatatgtcgtgaaaaaagaaaatcccccgactcgcatgattaaaaaccccatccaacacaattttaatattacgttgatgtgctgcatctagcaattctttaaatgctgcatttcctcccaataaaggatcaacttgataataatcatgggtgtgataacggtgattacaagcagattgaaaaatgggagtaaagtaaatagcgttaacgcctaaactttgaatataatctaattgttctaaaatcccccataaatccccacctttataaccttgcagtgtgggtaaagcatcccaatcttcccattttggatcatttaataaacgtttccggggttgtgtacttttagcgaatctatcggggaagatttggtagaaaaccgcgtgtttaacccagtctggtgtgtgaatctgcatacttactaataagttatgaaatagtaactctcatcctacaggaaaacattatccctgatgttgatttgagaaaaaatattcacattcactaaatctgacgaaacttaaataaaaagtactgcagaaacatggaaaaactctcctaaagctttagcttgtgctttactaatggatcttttaccattaacaatttctgaaactacaccctttgaaccgataacttcaactaaatctgcttgtttaagtcctcgtgcatccatcagatgtaatagaatttcttgaggagatgcagattctaaaggaaattgggaatcttcatacatttctacaagaatagaaagcaattctaatagagaggtttcttctagagaaagttcttttcccgattccatcaatttttcaatagatgcaatggcaatattatactcttcttcagaagtaataactttcggttggtattcttccaaaagagaaccgtaggttttgctgtccagtgtgatagtcatacttcaattaccttttgattatcaatcaaggttagtaaatttgcgatctggggagataataaatccttttttttaatcctgactcctgactcctgactcctatttccatttattagtttcatattcatcatgggtgagaagatatttgtaataaataatctgagctttaaagttaaaaccgacaattaaacgataagatttaatattaaaaactaaaaaattttctacttggtctacagaacgattataacttttacggatgtcctctaagttttgccattcagcgtctttaacaaccttacaccatgctttaacaccgttttgtatatctttaggaaattttttagcatcttctatcacattttgtcttttaattaacctcatagacttggaatagatggaatagttctatgttcacatattgagaacagaaagtcaacaactacaatcaggtgaatttgtacagtgcgtaagtcctagttatataaatgttatatacaagcagttaaacaagcaaaagctgaaacaggtttacctagagactcttttcctgtgatccgtccatatcatctacaacaagtaataattgatgattttctacctgattaacaaaatctatccattattaatacattagttctattttactggtttgaacccaatctcaaaaattcttcctcaagattctttgatccccccttatcagttgccactgatagtcctaaactgtaggtgagagttgaaaggcagtctggagaaattttgtgaaaaaagttttagcaatcattcttggtggaggtgcgggtacacgactgtatcccttaaccaaactccgcgctaaacccgcagtacccgtagctgggaaatatcgcttaatagatatcccaatcagtaactgcataaattcagaaatctataaaatctacgttctcacacaatttaactcagcctctttaaatcgccatattacccgtgcttacaacttcggtggcttcagtgatgggtttgtagaagtgttagcagcacaacaaactccagaaaaccccaactggttccaaggtacagccgatgctgtacgtcagtatctctggatgttacaggaatgggatgtagacgaatttctgatcctgtctggtgatcacctttaccgcatggattaccgtcagtttatccagcgtcatcgggaaaccaacgcggatattaccctttctgtgattcccatagacgatcgccgcgcctccgattttggtttaatgaaaattgacaactctggtagggtgattgactttagcgaaaaacccaagggtgacgctttagccaaaatgcgcgttgatacaaccatcctggggttaaccaaagaacaagctgaattacaaccatatatcgcctcaatgggcatatatgtgttcaaaaaagatgttttaatcaaactgctgaaagaatctttagaacggactgatttcggtaaagaaattattcctgatgccgctaaagatcataatgttcaggcatacttatttgatgattactgggaagacatcggaacaatagaagcattttacaacgccaatttagccctgactaagcagcctcttccaccctttagcttctacgatgaagcagcaccaatttacacccgcgctcgttacttaccaccttctaaattattgaattgcaatattacagaatcaatgattggtgaaggttgtattttgaaacactgccggattcaacattcagttttgggagtgcgatcgcggattgaatcaggttctgtaattgaagaaaccctgattatgggttcagactattaccaaccatcggtagaacgtcaatgtagtatagaacaaggtgatattcccgttggtattggtacagataccattattcgccgagccatcattgataaaaatgcccgcattggtcataatgtgaaaattatcaacaaggataacgtccaagaagctgaacgggaaaaacaaggattttatatccgtagtgggattgtagttgttctcaaaaatgccgtgattcctgatggaacagttatttagtctggtgattggtgattggtgattggtgattggtgactggtgactgggaaaatacaaataatttaatttctccccatctccccatctccccatctacccatcttccctattcccaatgactaaactacttttactaattggtcttcctggtagcggtaaatcaacattggctgcacaattactaacagaatgccctcagatgcaactcatttctacagatgctatccgggggcagctttttggttctcaagccactcaaggtccttggtttttgatttggcaagaagttgaaagacagtttcaacaagccactattgccaatatacccaccatttttgatgctactaacgcccaaagaagaaatcgccgggaagttatagaattagcccgtcacactggttttactcacattactggtatatgggtaagaactcccgtttggttatgtttaacacgcaataaaaaacgcgatcgccaagttccagaagacgttattttgcgaatgcaccgccaactttgggatgctccccccagcttagatgaaggactagacgacataatttataagtaaggtggggtgattggtgactggtgactggtgattggtgactgggtattgggcattggtaaaaatcttttctccccctgctc

SEQ ID NO: 104 - DNA, 13487 bp, Sphaerospermopsis sp. LEGE 00249
  LEGE00249_123
tgtctttgacaatcttgggaaatgaatttataatcatgatcaaatcaatattttgatatagcttgctcaaattttaatatattttgggctatttttatcacagatttcttaacattcaacacttctggtttaaagggattattagaagttggttgtgtttgcggaggttgggggttagtaacgacaacagttttttgaggaatgggattatttaatgctgctaaaacatctgttgctgaatgataacgttttttaggaatatcttgcaacatagtttctaaaacatcagttaattcctgacttaaagaaacatacttttgccattgccattccatatttatcgtatcaaataaagaatcagaaccatcaattttttgaaaatgtcccgttaataatctgacacaagttacagctaaactataaatatcactacttgggtaaaccatccccctaaattgttctggtggtgcatatccaggagttccggtaatagttcccactctagttaaaatactaccacttgtttctttagaaacgccaaaatcaatcaggaataatttaccggttttgcttctaataatgttttctggtttgatatctcgatgaattaccttattgtcatggataaattgcaaaacaggcaataactctgttaagataattctgatttgtggttcgtttaatttaccttgagtgtctaactcttgcagtaaattttgcccatcaataaattcctgaattaaatacagtctaccatcttggggaaagaaagcgagtaaatcaggaatttgcggatgtttacctaattcttgcagtcgttgagcttcttgttgaaataattccgtcgctttttgtaaagatgaacttcctgcttgttggggtaaaaattgtttgatgacgcagggtgtatttaatcttttgatatctacagcttgaaaagttctaccaaaaccaccttcagcgagaaattttaaagggagataacgatcatctaaaattattttacccccacaacgttcacaaaaattagtaccttggggattttggtaaagacagtcaggattgatacattgactcatggtagttgctgggtatatctagccatgattatactataccaccgtcagcattaggatatccaggatttaaggattttcaggatgatagtgtttaatggttggtggtgatttgctgatttgagaatttgtttgaatcaggatatccaggatttaaggattttcaggatggtatgaatatttatgatgttgatagttgaaaagtctatatataaagtctatatatatgggcgcacttttttccacctataacataagaataaaacaatttggggattttgtcaagtgttgatttgatgatttttctgcatcaggatgtaattggttgatgaatatctgtgatatatttatattattgattattgagatcatggaaattatttaatcttgaaagatcgttaaattgataatccataaattgataatccattaaatcctgtaaatccttaaatcctggacatcctgattcagacaaaaaaatcaaacatcaaaatcaagatattcaattactcatgattgtctctccaattttcccacatataagttagctcacctactgttatgatagtaagttgttacacagctaaattgtataatcctaatgttctcaactcttgtttaacaggcaagatgcctgttccacttatacaaattaaatgcacaacagcttagtagctatatttgtttctcccacttccttaaaaggatgtacaagatgttgatgttgatgaattaaaaattaaaactctgtttaattatcaattatcaattatcaattatcaattatcaatttccataaaggatgactcggtccttgttgacgaatcttaaaaacctgctgttctaaacgttgcttttccggttgtggtaaaccgatcaaaatattgcgactttgccaaactaaaacagaaaccgtcatcccaatacaaaaagctaaacccacagtagcaaatggatgaaaagccagagcatatcgcacagctacccaggtaaaatattgttgccacaaggtaaactcagtgcgtaaattccacagacacacaggagcaataatcacccataaacaacaaacaaataaccacctgccatatactgttagctggtataatttatgtacttgcttgataaaagcaacatcagaattttctaggtttgagtaattaattgttggttcttcttgtgagtccataagttattgacactctttgatctcctgactcctgtacgggcgttcgcgaagcgtgctggaagcatcagcattcgggtgattaattatcgatttttccccaatatttttatccgaatgcttcgcccctactgactccttaatcaacagatgtattaattttatctattgtatattcattgcgttctcgccaccatgttaacaaggtactagcaatgaaaatactagaataagccccggcgataaaaccaataattaaagccagagaaaaatatttcaaagtttccccaccaaacaaaaaaatagcaaacaaagacaacatagttgttaagctagtgttgattgatctgcttaacgtttgattaacagcatcatcaacaatttctgctattggtgtttggggatgatttttaatattttctcggatgcggtcataaattaccactgtatcattaacagagaatcctgtaatagtcagtaaggcaacaataaagagactatctacttctgcacctaaaaccaaacccaaaattgagaatattcctaccgtcaccaagagatcgtgaaatgtggcaacgatcgcaaacaaagcataatcccactggaaacggaaactcaaataaacaacaatacccaaaaaggaaactgctaaagctataactccagtcctaaaaagttctcttcctaatgtgggacctacagagtcaatttggtttttttgcgggtcaaaagcaccaatttttgcacttaaagcggtttgtaaattggtgcgctggtcagtttctaggttttttgtacggatagtgatgccatttttctgaccattttcagagattaattgaatactactatctcctagtccctgctctttggcaacttcccgcaccacattaatatctattggttgatcacagttaccaggttggctacaatctctcaccaattgtaaccgcgtaccaccaataaagtctaacccaggacgcaggggtgctttaatgttgggattttgccaagatatcaccattgagatgataccactgagaatgacggctgcggaaatagcccaccacagcgatcgcgctttattaatatgtaatgtcatctagccacctctgtcttatttgctgctgtcaagttaggacagtaaagttctgttttccgccaagcgggaatggaaatagctataaacatcaaggtacgactacaggtaatggcagtaaacatactcacagctacccctaaagctaaggtgagggcgaaacctttgactaacccagaacccaagtaaaacagagccgcgcaagcaatccaggtagtaacattactatctaaaatactggaaaatgcccgataaaaaccagattctacagaacgatataaagatttacctgcgcgtaattcttcccttgtgcgttcaaaaatcagtacgttagcatctaccgccataccaatactgaggataaatccagcaattcctggtaaggtgagggtgacaccgagtaagcaaaaagtagcccaggttaaaagagagtaaatcactagggatacatcggcaatcaatcctggtagtctatagtacacaaccataaagattaagactaaaatcagaccaccgataccggcgtaaatgctgctttgaatactatcttgacccaaagtcgcacctactgttcttctttcagcaatttctacaggtacaggtaacgcgcctcctcgtaactgtacccctaagttattcgcttcttctgcttggaatcgtcctgtaatgatagcagaaccgcctgtgatcccagtggcggcaaattctacgcctactgtgggagaactaattaattcattatccagaaaaataccgatagcgcgacctgttcctgctaactttctagtcaagtctgcaaaaagttcaccacccttggtatcgaagcgcaggacaacattccaattattaccttgggtgggttcaccgtaggcatctttgaggtatttaccagttaatggtggatcagtgctggcaaataattcggcgatggactgctgatttttcttgatatcttcttgatttttagcaatagcatctgcatcattgcttgttcttaattcttcttgcttatttttcagttctgtttctgatactctaaaggccagtagttgagtttctgtatcgggcttttgtaaccgaaattctaactgtgctgtaccccccagtaccttttctgcctgttctgggtcatttaccccaggtaactgcactaaaattttatcagtacctactgtttgaattactggttcagaaacgccaagaccgttaatacgaccttcaactactttctgcacagcttctagttctcgttccgtgatttctttgatttcctcggttgttttcacctgaatagtaagctgtgatcctccccgcaggtctaaccccaagggtacaggaattgtggcaatcaccgtaattgcggcgattaccaacactataattaacgctagtagcgatcgctgtttttccataccatcactcacaactgacaaaggctatgataactttctttttgtcaggtttgagtagaagatgagggaataattgacaattgacaattgacaattgacaattatcaattatcaattatcaattttcctacactcgcaaagccatcattttctgtacagcttcgacaatttgctctggttgcacaatagtcaacctttctaagttaccgttgtaaggtgtgggaatatcttgggaagacaaccgcagtacaggcgcatctaattcatcaaataacctgtcattaatggatgcggttaattctgcacctatacccccagttctcatacactcttccacaactattacacggtgggttttccgtattgaagcgccaatagtatcaaaatctaaaggtttcagggatattaaatcaataacttctggatcatatccttgtttttccaaggttttcaccgcttgcaggacatgataccgcatccgcgaataggtaaggatggtaacatctttcccagaacgtactacttccgctttatccagtgggagtacatattcttcttcgggtagattttcttttaagttgtaaagtaaaacgtgttcaaaaaataacactgggttatcatcgcggatcgctgcttttagtaaccctttagcattgtaaggtgtggaacaagcgacaatttttaaaccgggaactgcttggaaatatgcttctagtctttgggagtgttctgcacctagctgtcttcccacaccaccaggaccacggatgaccatgggaattttaaagttaccgccggaagtgtaacgcaacattcccgcattgttagaaatttggttgaaagcgaggagcaaaaagcccatgttcatcccttcaatgatcggtcttaaccctgtcattgctgctcccactgccaaacctgtaaagctattttccgcaataggggtatctaatactcgcagatcaccatactttttgcataggtctttggtgactttataagaaccgccgtagtgtcctacatcttcacctaaaacaaatacgctagagtcgcgggacatttcttcgtcaatagcttcccgtagagcgttaaaaaatagtgtttctgccatttagacctttatcacaatttaatgtttttaaattttatcgtgcctccgtccttaataacgtcagcgatcgcactcttattagtaatgggtaatgggtaatgggttattcaccctcccaatcaccagtcaccaatcaccagtcaccagtcaccagtcacctattccttgacgatttcatacaagtcttcaatcataacatcaaatatccgtgccaacttgtgaagagaagtaacatccaccgaagctaaccccggagacttcgcataatttttcagtgtggtgtatgctattcctgaacggtcagaaacttctttgagtgtccaacccttctccgctgcaaattctttaacccgcaacctcaccaaacccatacttgacaaaagcctaattatagtccattatagttataacataaaaagcgatcgcccctagtctaccaaacgaaagagcgatcggcaatcataatcataaatttctgcctctaggcattaatcctaaaggaaaaacctaaaaccatgataacactagaaaccacaaaatccaactacgtcaatcctttatttaagtttgtcaccaaagaagcgatcgccctattattgaaaatacccgtagagcaaatcagaaagattcgctgttggccgcacgtcatcctggtagtttctgaacatttagtcagatttgtgagttatgccgacttaccaccgattttagaagcagaaccgcccacagataaggatattctcacttggcgcagacgttggcgcaaactcaaaacctataaagcacccaactcttggaaagaattttatactttacagttacgtcaatctactaataaaggcactttacaagcttggtggggactggttaacacgattaagtttgcattatcccataatgctgtacagacaataaaaagcgtttttcaagaaattgaatatttaatggctgtttctgtaagcggataagcttgttaattgataaaaattacgcatcatgtatggaataacgaaccgcagagaacacagaggaataagagtttaataggttttttgtgtcagtcctgttaaaataagattgaatttttaattgtagtataagtgacagaagaaaccagaaatgaagttaattggcaagatattgtacaatttaacaaattagatcagcgtgttgctatagctaatgatattttccccaatctcattggtgtaaatgaaggatatattgaatggtgtcccgataatgacccaccaacccatttagaaactttactttggtggtgggttgttcgtcctgacttgggagcagcaatagctagtgaagcacctcaagaactaaaagaaattatcagtcgatacatcctcaatttataaataattgtcagaatcaggtggttatcgagtttcgactacgctcagtttcgactacgctcagtttcgactacgctcatgccaacctaaacaatatgactagcaacttgggttatctgaattattataattttgaccttatcgcccgttgcagtcggcggcacttttattaatagctaaaatctcacgcccaaacacaaaaacactcaaaaaactctctgcgtctctgcgtctctgcgtgagactaatttaacctattacaaccaccgagccgcatctttagcgtgataagttaaaatcaaatcagcaccagcccgtttaaacccagtcaaagtttccatcaccacacgctgctcatcaatccaaccattcaaagcagcagctttgaccatagaatattcaccagaaacattataagcagccacaggtaaattacttgcttgcttcacttgccagataatgtccatatatgccaaagctggttttaccatcagcatatcagcaccttcggcaatatccaactcaatttctttgatcgcttcacgggagttaccggggtccatttggtaagtgcggcgatcgccaaactgcggtgtggagtctgcggcatcccggaatggtccataataagcagaggcatatttagcagcataggacatgatagggatatcttgaaaacccgcttcatccaaacctgcgcgaatagcttgcacaaaaccatccatcatacccgaaggtgcgataatatctgcaccagcttgagcttgagaaactgcggttttcttcaataattccaaagtcggatcatttaacactctaccagttaaatcaccagttgttaaataaccacaatgtccatgatttgtatattcacataaacaagtgtcattgataacaattaaatcaggaactgctgctttaactgcggtggttgctttttggacaataccacaatcatgccatgcccccgtagcatcaacatctttatcttcaggtattccaaataagataatagcgggaatacctaaatcataaacttcctttgcttcttcaacaattttatctatggaaagctgataaactcctggcatagattttacttcattagcaataccttcaccgggaacagcaaacaaaggatatattaaatcattggttgttaaaacggtttcacgtaccatgcgacgtagttggggatgggtacgtaaacgacgagggcgatgggtggggaacatagattttatatcaagaaaaacgcgatggacatcaaaagaagcgtcacaaaagcagtgctttaccttgtgactttcagccaaactagaaacagtgcttaactgtctttgccctactgttgatgaagctgtggggcaattttgtattttacagctttgttgacactttccgggaaggaattggggaaaataatttgaaacaaaggagtcgtaggggcgttcgcgaagcgtgctggaagcatcagcattcggccgacaaaatatcaattttatgaaaagggtattttcctgtaagggcgaagcattcgggcgataaattatcaattttgatcacaggttattttccgaatgcttcgcccctacttcgcccgtacagtagtcaggagtcagaataaaatatatgtatctgaaagatggaaatacaaagaataaaaggaaacagatacaaataaaattctcgaagttataatttctgaatccttgctcttagctgatgactgattactgatagctgattactgatagctgattacttatcatgaaataaatacctaatgaaaaggatgattaaaaaactcggaagatgaatggataacggaagggtgtatcaggattaccaaaaactttgatgatagcaaaaattgttaatccccaatgtatcacatatcctaaacctgcgagtggtagtaatattatcaatggtaacactaaccaaccaagtagaaaaaataaagctcctaaaattgcgccataaaaccaaacattgaaatggaagttgatagattctttggcgttgtctttaacaactgggtcatcagagataattaataaagctatgggtaaaccaacggaaacaactgtggtgctgaaaaaaatcgcaccgtgagataaggctgataataatttgcgtttatcggtatcgtatatatcgtacatttttttatcctcatggatttcggttatttattatatcatattttgtgaaattttgataaatcaggatttttgattttgtctgaatcaggataaccaggatttgaggatgtacgggatggtaatttttagatggtttgtttggtgtttaaagttgtatttgtctgaatcaggataaccaggatttgaggatgtacgggatggtaatttttagatggtttgtttggtgtttaaagttgtatttgtctgaatcaggatttccaggattttaggattttcaggatggtaatttttagatggtttgtttggtgtttaaagttgtatttgtctgaatcaggatttccaggattttaggatgtacaggatgttatttatagattttctgttggtgtttaaagttgtatttgtctgaatcaggatttccaggattttaggatgtacaggatggtaatttatagattttctgttggtgtttaaagttgtatttttctgaatcaggataaccaggatttgaggatgtacgggatgtgattgagagattttctgttggtgtttaaagttgtatttttctgaatcaggataaccaggattttaggatgtacgggatggtaatttttagatggcttataaacattcaaaaacaatcattcaataacatcatcaaaaaatcccaacttcccaacaaacaatcatccaaaaacatcctgaaaatcccaacttcccaacaaacaatcattcaaaaacatcctgaaaatcctctaatcctggacatcctgattcagacaaaaaatccccaacttcccaacaaacaatcatccaaaaacatcctgtaaatccccaacttcccaacaaacaatcattcaaaaacatcctgaaaatcctctaatcctggacatcctgattcagacaaaaaatccccaacttcccaacaaacaatcatccaaaaacatcctgaaaatcttctaatcctggacattatctcgacttacttcgacaccgcccttcgacaccgctcaggacaggctcaggacaggctcaggacaggctcagtacaagtcgctcagtacaagtcgcggtagttgagcgtagtcgaaactcgataaccacctgattcagacaaaaaattctgattccaactacttaattgtatcatataattatgataaaattatacaactctttcatcccatcatcatcccactcttgaaaatatgataatctggcaaccaggacaacaaatcaagaacggtagatttatcattcaaagcattttaggtactggtggttttggtattacctacaaagctttttatggatgttctggaaaatgatcctgtaccaattttacaacgtaatgccaatattcccaagcaattagcagcagtaatagatttagctttaactgaaaaaccgcaaatccattttcaaagtgctgcaaagtttaaggaagcactcatgaatgtaattctgtaaatccttaaattctggatatcctgattctgacaacgtagacattcagatataatataatagacttctccagaaaagaaattatggcttatttatgggggcaggtcgaagcatttgggatatctagatgtctgatttttccgtcaaattatcgcccaaatgcttcgcccctacaatatattaaaaatcaatacattctattttggagaggtctattggtttagctaatccttctgcaatttctcttttagcacgttgagcagatgcaattaatttttgttgacttttttaaatgaattatcccattttaattcatcttgtaaatctgctaaatattctctcaaatgttctgcaactctgtcttgtacatcttcagataaagattccatcattttgatgacagtggtaattgctggagatgacataatagaatttcctttacaactttaccagtctattctactcaaaatctccccatccagatgctgatagtacagataatatagaatattacaaactcacatcctgaaaatccttaaatcctggaaatcctgattctgaccaataaaataatctgggaaatcttcaacaagaccctatatgcgcctacattttcccactataataaaatcatactgaaaactccccaatttgtcaactacctcacccatgaatttttgaattatctgaattaattgattgattcaccgatgaaaatgaatagaatagacaaatatgtttccttagtcctgaaaaagattacatttaattaagtaaggtaaaaaacaaattacaaattatggctactgaactgattgaagaactaggtgaagcggtggaactgcgtcgcaattttgcgattatttctcaccctgatgctggtaaaactacgttaactgaaaaattattattatacgggggtgctatccatgaagcaggagcggtaaaagctcgaagagaccagcgcaaagtcacttctgactggatggcaatggaacaacaacggggtatttctattacctctactgttttacaatttgtctataacaattgtcaaattaatttacttgatacccctggacaccaagattttagtgaggacacttatagaactttagcagcagccgataacgcggtgatgctgattgatgcggctaaagggttagaacctcaaacccggaaactgtttgaagtgtgtaaaatgaggggtattcccattttcacctttgtgaataaactcgaccgtccgggaagagaacctttagaactgctagatgagattgaacaagaattgggattacaaacatactcggtaaactggccgataggaatgggcgatcgctttaaaggcgtatttgaccgccaccaaaagcaaatccatttatttgaacgtagcgcccacggtagtaaagaagcccgtgatactatagttgatttaggtgatagcaggattgaacaacttttagaacaagaactttaccatcaacttaaagatgagttagaactattagaaggagccggtggggaactagatttagatttagtgcatcaaggaaaaatgactcctgtgttttttgggagcgccatgactaactttggggtcgagttattcctcaaatacttcttggactacgccctcaaacccggtacacatcacagcaccgctggcgaaattcccccaacttacccagagtttacaggatttgtcttcaaactccaagctaacatggatcccaaacatagagatagagtcgcttttgtccgggtctgcacaggtaagtttgaaaaagatatgacagtgaaccacgcccgcacaggtaaagctgtccgtctgtctcgaccgcaaaaactttttgcccaagagagagagtctattgatgtcgcttatgctggggatgtaataggtttaaataaccctggcgtttttgccattggtgacacaatttacacagggcaaaaactggaatatgagggaattccttatttttcaccagaactgtttgcgactttaagaaaccccaacccctcaaaatttaagcaatttcaaaaaggtgtttctgaactaagagaagaaggtgctgtacaaattatgtactcgactgatgaagctaaacgcgatccaattttggcagcagttggtcagttgcaatttgaagttgtgcagttccgtttacaaaatgaatatggtgtagaaactattcttgatttattaccatatagtgtggctcgctgggttgaaggtggttgggaagctttggaaaaagtggggcgtgtatttaacactacgacagtcaaagatagtatgggaagaccagttttattattccgtaatgaatggaattgtcaacaattacagggcgaccatccagagttaaaattaagtgcgatcgctccagtgttttctagtcaacaaccagtagaaaaataaactattaaaagggaattggtgattggtaattggtaattgggaattggtgattggtgattggtaattggtgattggtaattggtaattggtaattgggaaaataaaattgattacccagtccccagtccccagtcaccagtccccagtccccagtccccagtccccagtca

SEQ ID NO: 105 - DNA, 13350 bp, Sphaerospermopsis sp. LEGE 00249
  LEGE00249_124
taggggagggcatccccgaagtcacgctacaggagttgggatctctgttctggttggcgaaaacctgctagagcaaattctgacgtagaatgtagaatctccgcggctttagcccggagagtgtcaatcttctgagaggttgtttgaaaagtattagatgaaaccgataatctctagaaacctaacctctccgaaaaagatgtagggacaattcatgaattgtccctacgaatgagtttcaggttacccctatgtagggtttactgaataaacctaaaaccttgatatatcacaggttagaggctgataaacacagaaattagtgcaagggttttgaagggtataccggaaaaagtgtgcatttttggggatttcaagagatggcaaagaaattttccaatctcctcctgactcctgactcctgactcctgactcctgactcctatgccctcacggaaagactttctcagcaacccctatgtaattttcggagatgtataatgtgttaaccggcgctggcgttaactgtattaactgtattaactgtattaactgtattagctgctgccatcgcttttttagatgcttccgtcgcccccatgcgaatctcagaagtgaaagaagccatactaaaaccaccaaaccgcttgaggacacttacccgcatccgcagattaggactagcaaaccacagtctttcctcagaccacatggtttcatactcagtaattaaagttaaagcaccatcatcacccattttgtaagttcctgctacgggtgctttttctgcataacccatttctcgcagtaacttaccttctccgggtttatctgcatcaggtacggtaactaaaaccgtagaaccttcgtgtttttcttcatcccattccattgttcccttccaggtaactcttgcaccacaggaagctgtactgggatgaacttcatactgttcacacagtttgatcacttctggatgatctgcggccagcatttcaatcacgatgtctgatttaccatcttctgattgcttaaaggccaaatggtgacttgtacggtgagagaaccatttcccagcacttagctcaaaaaactcttcaatattcatgaatcgaattatcctggctcaaaatacaaacaatcccacttttattattaaacgttaacaggaagcgttgcctaaacttgattttctatttcttttagtctcttgagggaaatcgtcgcagcttgggcaacatgaggatgactatctttttctaagtatttcaaggctgaaacactcttggcagtagggagattacccaaagcttctgctagacgttgccgcactaaccaatcttcggcttgggcaaagcgcaggatgtgatctacagattcaatagatttaatttctcccaaagctgaaatagcagcttgttggatgactacttcttggctattcagtgcttgaattaaaatatcatgggcgcgggagtctttaatattacctaacgccacagcagcactaaatctaactaaccaatctgtatcttcataaaatgcccgtgatagtgcctcaactgctctattatcacccaaataacccaaagcaccggcagcgtcagcacggataccataatctgggtcagtttccaaaatccgcaccaggataggataacattctggagtttgtttgatacctaaagcaaatacagccattgagcgcagttgcagagattcatcatccaatacttttttaatcaaaggtacagcatcttctgagggaatatcgcggaggttggcaagggctaccatgcgatcgcgcaaatttggactttctaactgagtagaaattatctctaagttgggagcagtcatttatatgaaatcactatttttacctatctttactttaacttaatcaaccaaatctaccccaagtcttatgtttgtctacaaaaatagccgttatatgtaaaatataaactgtatcttaggtatgaagagaatactgaaggctaaacgtagggttataaggaacgactgttggaaacagcgtttaaccttcaggagaaaaacaatggttcaactcagcgaacgtcctggcgtaaaaaaaatctctagctcacaagataaattcatttacgaaattggtgcgatgtatgatgctgaacatcgctttttagaagctcaacagatgatgtggcaatgttgtcaaaacaatcaattgaagtccttaattgagacacacatccgcgaaactgagcaacaaattagaaatttagagcaagttttcaccactctgggacaacaaccacaacgagttacttgtgatgctgctgctggtgtgatcagtgacggtcaaaaattcatgcttttggctgctgacagtccaaaaattctcgaacagggaatagcaggtggacagttagtagtcgaacatttggaaattgcttgttatcggtgcttgatcaaaggtgctgaacagatgggacaaaaccaagtggtacagttgctacaacagaatttgcagcaagaagaacaaacagcgcaaaaactagagcagttactaccacagttacttcaacaagctcagtctggtgacggaaaaactacggctaaatctcgctaatttaccaattgataattgataattgacaattgataattgacccattcttcaagtctccctttcttcagcggaaaaagattaaagttttccattggacaagtcaatcttttttctttcaaggataggtaattttcaattgcacattattaattgtcagtttttgcaagcggttagcgttgaaataagctaattaatttgtagggacgttgcaggtagcgtctctacattttttattaattgggaattgtggagaaaaattttagattttagattttagattttagattttagattttagattttagattttagattggagttgagaaaaacaatccaaaatccttgcagccaaaattcaaaataaataactcctgactcctgactcctgtacgggcgttcgcaaagcgtgctggaagcatcagcattcgggcgataaattatcaattttatcaacaggtgattttcctctaagggcgaagcattcgggcgataaattatcaattttatcaacaggctattttcctgtaagggcgaagcattcgggcgataaattatcaattttatcaacaggtgattttccgaatgcttcgcccctacgactcctcaattctgctgtatttacaaggagttgattttacatacttggtggcaaaatcaaattatcaatttgatgaattacaccgttacttgctggaatatctgcttttgttacttgagcatcattcacagatactcccttagaaggattgactataaccttaatgggatctccttgtaagctggtgacttctccagattttaaatcactagaaagaactctacctggtatgacatgataagttaagattttcaccaaaatctctttgttctctggctttaacaaatcctgcaccgcgtcctgtggtagtttggcaaaggcttcatctgtgggcgctaaaattgtaaatggtccagcaccttgcaaagtttctttaagtccagctgcttctaaagctttgatgagggttttaaaattacctgctgattcagcaacttctacaacgtttttggtttctgtggtctgggttggtttggtgctgggagtagctggtgttgaagttccaggtctgtttctggttggtggtgtgacttttggagtttcgctaggtgcagtaccacggttgtagggaggttcgttgaaaatacttggtctaggattcagcactccatcgccgctagactgggctatctgtgttgtaattgttgtaattgttgtaattttgatgttggcatcatgatttggcactacttctgctctagatggtaaagtaatcaggagattaactcctgttactcccagtattccagcgatattggtcaataatttgctgtaattagccttcataaatttttttgtctttacttttgacaagctacataaaaacttataacatttcattaaaccaagggaatagggaattggttgtacggattattgttcaataattaaataggattcctatatcagctaatgcctactattagcattttggggatgacggtttgttgtacgttgttgatctgtctgaattatcgtcgcatctaacagttatttatgggcaactatactttttaaacacatctaattttactcagacataaaattagataattataataataaattgtcctcttgaaatatttacagctatcagtgaagaaagacggacatttttgttttcactcaataggtaagattaattttgtttgcataattataattatcaaaaaatgtaaatattaattgttttggagtagttcaaaatattataataaatcaccatacttaaattttatgatttttagggtttcatgatttttcatgaaaaatgattagtgttaaccgcctctgtagtcaaagctgtttcatggagagttaaaatacccattcgcagataattataaattctcaattttcaaataatcccaaaaattacatcaatcacacactgaatagttactagaaaaattacttaaactcaagatagaattgtaaaatagataaataagttagttagcacggaagagaatatgctggaattatatcagtgggaactatctcaatattcagaaaaagtgcgtctatgccttgattataaaggcttagagtatcgcaaaattgaagtcactcccggaattggacaagtagaattgtttcgtttgactggtcagaaacaagtaccagtattaaaggatggacatagatatattgtagattcgacggaaattgctaagtatttagactcggaatacccagatcgtccactgataccaaaggataagaaaaaacgcgctcaggcgttattattagaagattgggcagatgagacaatgggaattaagggtagaaaagctttgtttgctgcgatcagtcaagatcaaaatttccgcaaatctttattaccagtctccacaccagatattttgaaatctgtggttgaaggtgtaccaggtgattttctcaatgtcttgggttttggggtgggttttactcctgatatcataaattctgcgatcgctagtttaaaacaagatttagaaatcctcacagaactattagcagatagtccttatctgttgggagatgaacccactatagctgatttagcagttgcaggattatcaatattattaaagtttccacaaggtccttatttggatttaccagaatctctcagaggtaaaggattaccaattttagccgataatcctgattatgaaccatttttcacctggcgcgatcgcctctatgaacaattcagaaaaccgtgaacaggtaaaccctccgctaccggaagcgcacctacttcgatacaaattgattaatgtaggtgattggtgattggtgactggtgactggtgactgggaagatgaataaccgaattaccaattaccaattaccaattcccaattaccaattcccaattcccaattccccattcccaattacctatctaaaatgaattcaggacaaccattaggttcagttattgaaggttctctcactggaggtttagaagtaagattacacccggatatctctgtagaagatatgcgggtaggtaaatttcttgtagttcaaggggtgcgatcgcgttttttctgtatgctaacagatgtatctttaggaacagcaaatgcgcgaattatcgctaacccccctggttgggaagatacttttttacgggagattttagcgggaagcggtacttatgggatgatcaacctcgcacccatgttgatgtttaccccggaaaccaatgaatcttttttctctgttaacggtaaatccttcaatccctttgtaccatctgctacaggtttagcttctttccaacctcaaaccagcactacaatggaattgctacctgtaaaaactatacctagtcattttagccaagtttacgaagccaatgaagaggattttcggcgggtgtttggttgggaagatgacccccacagaaacaacttctctatcggtaaacccttagatatggatgtaccgatttgtattgatttaaaccgttttgtggaacgaagtaatggcgtttttggtaaatctgggactggtaaatcgtttctgacacgcttacttttagccggtgtgattcgtaaaaatgccgctgttaacttaatttttgatatgcactcagaatatggctgggaagcagtggcagaaggtaaagaagttaacacggttaaaggtttaaaacagttatttcctggtaaagtcgaagtttatactcttgatccagaatcaactaagcgtagaggtgtcagagatgcacaagaactatatttaagttatgaacaaatagaagtagaagatattaagttatgtgctagagaattaggtattaccgaagcagctttagacaatgctaatatcttatgtaatgagttaggtaaatcttggattcctcaattgttcaacatgaccagtgaggacattaaaatgttttgtgaagacaagccaggacatccaggctcaatcacttctttgcagcgtaaattattacgtttagatagtttaaaatatatgcgggcagtttgtccccagaactatattaaaaaaatagtacaatctttggaagctggcaaaaatgtagtgatagaatttggttcacagtcaaatatgctctcttatatgttagtgacgaatatgatcaccagacgtatacatgagcattatgtcaaaagagcagataaatttctgcaaagcaaaaatcccttggatcggccaacaccattaatgattacaatagaagaagcccatcgttttcttgatcccgcagtggttcaaagtaccatctttgggactatagctagggaactgaggaaatattttgtaacacttttggtagttgatcagcgtccgtctgggatagataatgaagttatgtcccaaattggtactcgcatcactgctttacttaacgacgagaaagatattgatgcgatttttacaggtgtatcgggtgggggagctttgcgttcagtcttagctaagttagattctaaacaacaagctttaattttaggtcatgccgtacccatgccagtagtagtgcgtacacgtccctatgatacggtgttttatggggaaattggtgatcaagtgtgggaagaaaaatcagatgcagaagtttttgcggccgcagaactcgctaaagctgacttaggtttttagtaattccagggtgattggtgattggcaaggaaaaactctatcctgactctatcctgactcctgtacgggcgaagcattcgggtgatcaattctcgatttttccccaatatttttgtccgaatgcttcgcccctacgacttcttataaattcgtgacatccctccatcggggtagcttgataagttcggttatccggacacttgtaagcaacagaagaggggtttttaacgtcactatagatatatggtactcctgtaggggcgaagcattcggaaaatagcctgttcagaaaattgataatttatcgcccgaatgcttcgcccttagaggaaaatagcctgttcagaaaattgataatttatcgcccgaatgcttcgcccttacgactcctgactcctgctatagttagggttttaaggaagttgaaaataaaatttagcagtcagtccattttactatatgatagaaagatttagctgctgctctttactatctgccaaatctgccgtaccataagaaaagtaaaactcatactgacttcgtgtttgacaaatgctgtcatccgcaaaagaaaggaagaattcttgaaaaccaaccagtgtgcttctaagatattccaaaattaaaggagggttgggggaacccatgccagggtagcaccgtcgtgacaacggctatataaataaatagatcgcttatagtagctttgatgatgtctatggatgtgtatgccacccttattaattcaccctagttgagaaaatattgattttgtatagggagtagaggacaacgcaccaatgcctactgttaacaacgaaaatgaaaacctgaatgccaaatttacggctgatatggtgcgaacctatctgcgggaaattggacgtgtgccactgctaacccgtgagcaagagattgtttatgggaagcaggtgcagcaaatgatgacgctactggaagctaaagaagctttagcgaaaaaactagaccatgaacctagtttagcagaatgggccgcccatgttaaccaatcagaaaatgaagttaaacatacggtggcgttaggtaagcgagccaagcaaaaaatgattgaagcgaatttgcgcttggttgtggctattgccaaaaaataccagaagcgaaatatggaatttctggatttaatccaggaaggaacattaggtttagaaaggggggtagagaaatttgatcccatgcggggttataaattctcgacttatgcttactggtggattcggcaagcgattacacgagcgatcgctcaacaaggtcgcactatccgcttacctatccatattaccgaaaagctgaacaaaattaaaaaggtgcaacgggagttagcgcaaaagttgggcaggtccccaacaccaacagaaatagccaaagaacttgaattagaacctgctcagattcgtgagtatctgaatatggcacgtcaaccagtttctttagatgtgcgggttggtgataaccaagacaccgaactgcaagaaatgttggaagatgaaggtccatctccagaatattacaccaatcaggaatttttgcgccaagacttaaataacctgttggcagaactcacaccccaacaacgggaagttttagctttacggtttggtttagaagatggtaatgaaatgtccttggcgaaagttggtgaacgcttgaaacttagccgtgagcgagtccgtcaactagaacatcaagcacttgcacatttacgccgtcgtcgcgccaatgttaaagaatacgttgccagctaaaagcgtagacaagcacctgcttgtgagaaaatatgacttttggcgggttgcctcctaatttcagggggcaatttttttagttatctttgcgtaaagggtataggaatccggtttgattcctgaacatacttgtgtaggcaggcaagaggtactcatagaagaggcaaaagggttttagaatatttaggtgtacggagttttgttcaattatcaaatataggactaatatttgaactttatattttcttcatccagtcttgaacatttttgattatttttatatataaacttccaaattatctgctattatttactaccaaagaagttttgagatggtgtcagtctcaaccatgtagaggttggcgtgaaatggctcaacaaggagtggagattcacgaagttcctggtacacatctgagtatgattggagaaccaggtgtacaaattttagcggaaaaattaattttttgcatagagcaggcacaagggactggcaaataatttattttttgcagttccctgactgaatttttttttactctgatccgaaatccctagggttgctgttgtagtgaatcatgagatcctgatcaccaaggtgtcaatcaatggtttgtatcacactttgagatgaaatcaagtgatcaggatcaatactttacctgttttcacccattgaggaattgacaatacaaatgccaaacttaagatatctcaattaaatattaaatcaaagttggtaaaaagatttttgtcatcccccacaagaatgactctctagtgcgaagcattacacttttcaacaatgatattttgagatgatcaaccaaaatctataaaaacttcattttttgatggttttttattccagataatatagataaaacttttgcaggaatctttaagtattggtgtttggttattatttaggtaagtagataacagtagttattttagttacaggagatgtcgggtgcttaacaaaaattttcagttcattccccaaggtaaattcaaacttcccgttgttggcttactaattacatttggaattataggtttaagtgtaattggagaacggacaaaaattaacctgaaatctacagccacagcagcgaatttaccaggttatgcaaatcaaattcacagcagcaatgaaaactctcttttgtcaagactgcgagatattagagatcaaagaagtcaacttgagttaaatactgttgaaccacaaaatgtagaatctaatgtagaatctgaagctttaaatagaacgttacacaatatacccacaaatacaagaccaagaggaggaaaattacctgttaattttcctgaaaaagatggaatttatctttatggacagtcctcaacaccaaacgagttaggacaaggttatattgtgtttcagaaacagcaaggaaaggtaattggtgctttgtatatgcccagttctgagtttagctgttttcaaggtacaattgctcaatctggtgagttagcaatgacggtaactagctctcctggtgaagttggtgttactcaagtttcaactactagcagaatacccaactttaccgatgaagatactgctacctatgcctattctatagaactgcaagactatcatcagttaaattctgtcagtgctaatgatagagaaattttacaagcttgtagtcaacatttcaggtaagcatttagctattagcagtcagcggtcagcttgttaacagttaagcccaaaatcaatatttgaacatctaccaattgatcaaatatatcaaatattctgactcctgactcctgactcctgactccttgcgtttaatactcaattcccgcttgcgctttaattccttgatctttaaaaggatgcttaattaaagtcatttctgtaactagatccgctttttcaattaaagccggtggtgcgcctctccctgtcagaattatgtgtttatctgctggtttttcggctaaacctgctaagatttgttcaacttgtaaataaccaagtttgagagcaatattaatttcatccaagagtacaagtttaaactctgggttgcggataaattctaaagatttttcccaagcagcgttagctttctccaagtctctatcacggtcctgggtttcccaagtaaacccttcacccattgcgtgaaactctagttggtctgtccaatgactaaaaacccgcttttctgaaggttcccaagcacctttaataaattggacgatcgctaccttgtatccatgaccaagcgatcgcatgaccatacctaaagctgcagtcgtcttacccttcccattacccgtattaataataattaaacctttttctgggatggcgttagctatacgttgatcttgtatttccttacgacgctgcatttttttgcggtattgttcatcattcagcgatgatgttgaagatgacatgacctcatctattaaacgggaaatttcctgatcagaatttaattcttctggttgatcgtttttcatcaataagtcttatctagcaacaactttgactgcgaagtttattttatataattactgatttcttaattttaatataagaaacccaaaaattctgtaataactgatcacataatttcacatttcccaaaaaattaaccaaaaaattaacattttgattttctctgtgttctccgtgcctttgtggttagtttaaaaaaaatatatcaacccaacttgaaacaaccgcctaaaaaatagataacattaaatgcggggtatttaccatgagagagtaaaaaatgtcaaaaaaaccaggtaaaaaaattgcacccatacccatgtcagccgacattagtgtggttgatttaattaacaattacttcaccgcttacaactctgcccggttacgagaagcttgtcaactgctaactcaggatatctttcaaccaggtgtcactgtgggggtgagtctttccggtgctttgacaccagcaggttttggagtttccgccttagcgcctttaattcgtcatggttgcattgactggatgatcagcactggtgcaaatctttaccatgatatgcactatggtttaggttttgaattgtttgcgggtagtccgtttttagatgatgtcaagttacgggaagaaggaacaatccgtatttatgacattatttttggctatgatgttttattagaaaccgacgcgtttatccgtaaaattttgcaagctgaaccttttcaaaagcggatgggaacggctgaatttcattatttgctgggtaaatatgtgcgggaagtagaaaaacaattaggtgtacaacattcctgtttgttagctacagcttatgaatatggcgtaccgatttatacttcttctcctggtgatagttctatagggatgaatgtggcagctttggcgttagagggttctaagttggtgttagatccagctattgacgtgaatgaaactgcggcgatcgcctatgctgcacgggaaacagacggtaaaagcgcggctgtaattctcggtggtggcagtcctaaaaactttttgttacaaacacaaccgcaaattcacgaggttttaggattagaagaaaggggacatgatttctttgtgcagtttaccgatgcacgtccagatacaggcggtttatcgggtgcgactccagcagaagcggtgagttggggtaaaattgacccggatgagttaccgagtacaatagtttgttataccgatagtaccattgcgctgcctttggtaacggcttatgtgttaaatcagtgcgaacgtcgtcctttaaagcggttgtatgatagacggggagagttgttagatactttgcaaaaagattatttagcagcgaaggataacccggttgttaaggaaggtggggaggaagtagcgacttatccctgtggtacaccggtgaagcgttaaggaataatacctctccctaaccctctcctacaaggagagggaaaaagagtgatttttattgttggagaggttttaaattaatttttgaggatgacatctaatatttctggcagggtaaaataaatatagtaaagaattggtgtacccacaatatcagaaatgttgaatgtcgttacaaaagtttacatattcagttatagtagtcctattaagggtgaaaatgtcaacatctcatgatatcttccatccaatgaacataactaatttgttgacacatacaa

SEQ ID NO: 106 - DNA, 12307 bp, Sphaerospermopsis sp. LEGE 00249
  LEGE00249_125
ttgagaaacttaattggaacacaatcgcgtctggctaaggcgtgaaagtctactgagggataactgctcccatgctcccgttgaagtagaaagtaaagtctagttttgtctaggttttatatagcagtgatacttttcgcttaactgatatttctcctgatccagattcctatctagtttttagggtgtgttaggctcgcaacaatagggttaatgtacattaactgctatgggatctaacgcaccctacaaaattacatctttccttttgccatcacttgttgcagatgttcacgaatttcgtgcgctccgtcaatttctgactgacgcaatttttggaatagttctacacaaggttgagaatttgcttcttgtgcatcttgaatgtaacgttcgtaagcttgcactgctgctgctttgttatgcaatactgtgataaagtcgtattctaaattactaattggttcttgagttttggtctgggtagcagtcatttttttgctcctttatttaactatttattgaatttatacaggttatttaagttatattcatctatctcaaagtggacaaaattattacctttagatagaagtattcagttaataattgaacaaggttttaagtaactcaactttaaaaaacgtcatacccagatccccgacttcttcaagaagttggggatctatccactgctatatttactttgacagaggtgggttatcctcatattcatcggaatactgaaatacgaatttgttttgtatttctctattctcttgatgcacgataggacaatattttgtgtttgcactcatgcagtccatgtggggtgttttcgcacatactaataatagtccccccaaaatgagtaataagctacaaattgctgctgtttgtgtgccggaaatatctaacgcaccatgaacaactacttcccgcagtacggaaactattgccacctccacggctacacctacggaaatactatgttcttgtaagtaaactatgagtagtcgaaataattccacgagaattaacacaaatagtatttttgatgtcaattctttgtagtgtaatgagttaatgatggcaataactataccccacaattgtatcaacattaccgcaaataaggctaaacataataccatcacgatgaggtcttgaaaagcctccatgttacgcactattgcatagcgatctaaccagcgatcgcaaaataaaaatctactcttgaagcgtttttgcatgactgtttacattccaatggcagtcagtaagctatcagctatcagctatcagcagtcagctttttagggttacaccaaaaatcattggttgataattgatcaaatattctgactactgttagggtttagcattgctaaacccctactgactcaattctgaactcttaccaatattcctatttttacgtaacattaatgttttctgcctcagcgtggtttgttatttaatttttgtatttgtgttaacaatttgtctgcattattcacccattgagtattaccttgatttttatacaaatctctcgcatatttgattagttttacggcttctggatattgtttcaattgtacaaatactaatcctgcaccataataagcatcggcataatttgcatttgcttgggtggattttctaaatgctgctaatgcttcgttaaatttgccttgattaaataaaattgaacctaaattataatgagcttctgcatatctgggattgatggttattgcagcggtaaatgctgattttgctagttcaattctacctttttgtaaataacaaagtcctaaatgataggaaggttctggagaatttggactatgtatgatcgcttgttgaaaagaggcgatcgccccatcccaatcttttttaatttctcgtatcaatcctaagttataatgagcaaaacccaattttggatctagttgtaaagctcgttgtaaataatcatttgctaactgtaaattattcccttctaacaaagcactacctaaatttgcaaaagctaatgcaaactgtggatcggcttgcgtagcttgataaaatgcgtccgctgctggttgtaactttccagtttgtcgcagtgctaaccctaaattataatgcgctgctgctaaagtcggatctaattgtgttgcttgacgaaaagcgttaatagcttcttgtatttttcccctttgaatagcttgtaaacccctatttaaccagtctaaagcaatttgacgaggagtttgagctaagaggtgacaggtaacagatgacaggtgacaggtgacagcagatggggaaatggggaaatggggagaagtggaaaatactggtttaatattgatacctagtaccagtaaagtaacaatgccaataaaaggatatttttttaaggaaatagtcataaattagccgaataatattgtcactaaatattgagtatgaacctattttttaacaaatattttataattggtatataaattagcatagcttaatattacttaatcttaatcttacgataaactacaatttttttgcaccgagcttaaaagatggataataaaaaagtcaggagtcaagagtcgtagaggcgaagcattcgggcgactaattatcaattttatgaaaaggctattttccgaatgcttcgcgcctactttgcccgtacagtagtcataatgtttgataaatcagtgaaataagccaataacaattttgagtatagctgttaaaaagctgaaagctgactgctgaaagctaaaaaaattactcctgaaaaatacataatgcggttgagggaatcaccgtaaaggagggtttatgagcgaaaaagtaaaatccggttcgcggaatgtagcaattgttggaccctattctagtggcaaaaccacattattagaaagtttgttatttgtcaccggagcaatttctcgcaaaggtaacattaaagatgctaacacagtcggagatagtgctaatgaagcacgcgatcgccgcatgagtgtagaagtttccacagcttgtacagaatacgaaaatacacgcttcacctttatagactgtcctggttcagtagaatttgtccaagaaacttataatgctttaatgggaattgatgctgcaattgttgtttgcgaacccatcaaagatcgagttttaactttagccccattattcaaatttctcgatgattgggaaattccccacatcgtatttgtgaataaaatggatcgggcaaatattcatgttttagaaacattaaacgccctcaaagccgtttctagtcgtcctttagtgctgcatcaattccccattatgcaaggggaagaactcacaggatttattgatatggtaagtgaaaaagcttatcaatatcatcctggtgctgctgctgattccatcccatttccagaagcattaaaagccgaagaacatcaagcaagagcagaaatgttagaaactttggctgattttgatgatcatttgttggaagaattattagaagatatcgaacctccccaagaagaaattctcaaagatttaaaactagaattaggtgctgatttagtagtaccagttttctttggaattgcggaacaagattatggtgtgagacctttattagaagcaatattaagggaagcaccagcaccagaaaccacaatggaacggcgtttagaaaaaattagtgatactcctttagcgcaagttctcaaaaccttttatactccccaaggtggcaaactttccttagtgcgagtttggcaaggaacgttaacagatggtattgttttaaatggcgttcgtgctggtggaatttaccgtttaatgggacaacaacaacagcaaattaacgaagctgtagctggagaaattgttgctatttctaggttagaaggagttaaaaccggagatacaatttctaccaattcccacattaaacaattaccaaaagctgaacaattagaaccagtttttgctttagctataacacccgaaaaacgtaatgatgaagtcaaacttagtgctgctattactaagttattagaagaagatcccgctttagcttgggaacaacatggagacacccacgaagtaattttgtggggacaaggtgagatacatttgcaagttgcgttagatagactgcgacgcaaatataatttacccatgtctacccatcttccccaaattccttacaaagaaactatccgcaaacctgtttcttcagttcatggtagatataaacatcaaagtggtggacatggacaatttggagatgtttatttagacattcaaccattagcaaggggagaaggtttcaatttccgggaaacaattgttggtggtgttgttcctagacaatatattcctggtgtagaaatgggtgtgaaagaatttctggcacatggtccattaggttttccaatggttgatgttgcggtgacattaactaatggttcttatcacactgttgatagttcagaacaagcttttaaacaagctgcacgtttagcgatgcaaacaggagtaccccaagcacaacctacccttttagaaccaattttaaaggtagatgtgaatactcctaatgagtttacctctaaagttttacaacttttaagtggtagacggggacaaattttgggttatgaaggtagacaagattggtcaggatgggataatgtttctgcatacttaccccaagcagaaatgcacgattttattgtagaattgcgatcgcttaccttgggcgttggttctttccattgggaatatgatcacctgcaagaagtaccggataaaattgccgaacgggttttaattaaaaacggtaaatagtcaattctcgttcccagtctcctgactgggaatgctatcaggaaggttctaccttccttttttttctcacgcaaagacgcaaagacgcaaaggaagaggagaagataagatcagaaaaatcaagtgtttattctggtaaataatcttgatttaaaatttcatctgtagtaaaaggacagtctacagaaaaagtatcaattgataaacctgtttccaaggatgcttgttttctcgcatcttgataacattcgctaaatacttcagcaaaatatttttttaaactgggactttcggttaattcttctttcaatctgcgtctatgttcaaaaatagtagataaccaactattactgcgtttatctggttgatatttatatttgagaaggtgcattaataaaattaataagttactttttaatgatcttttttcacttcttcccatgctttcgatttcttcaattaaattctctaaatcaatttctgcaaagttaccattttttaattgtttagctgtagtttctatccataaataaaaatcttcattataaagatttgaactagcaaggtttgtaggttgatttgctttcatctgctggaaaactccgcaaagaaattgtgagattttttggtagcttctttaagtaattatataataattcctacttttcctcgttcccagtctcctgactggaaatgctatcaggaagtttctaccttccgtttttcattaatattcatcatcattaccaaaagtcacacaaggactatcaacttctactgctggagtgaatgaattacaaaaaatgacagtagcacaattaacccctaattcatcagggtgagtgcattcctcctggactaaaaaagcacagtctttacaaatactcttacatgacattggttgcgcgtctttggagtctgacatagttaaaaactctgaatatcagataaaacccactacattgggtgtattgtagtggggaatagcagtaacaaacaatgtcattttcatcatctgttatttttgtcactggtttaattattttatgtaaaaattacatcattatcttgcatttatggcaaaataccatattaagaaagtttagttttcccatcagttaaaattttattttcgtttttatatgttatagcctttaattatacgttattttgttggttatgatgttggggtgttttgcgtaaacccaacctacttgtattttttataagttacgtaaattatctgttgctttttgtgtagaaattttgagcaatttataagaaatatcgagaaattaaacaattttttgattgtggtgacataaaaattacaatcactattataatatttgcagttatttaacacacatcaccatgagttcaaagactaaggatttacaggcaagttacgctaaaactcgcttgctgcttgcgttgtgggatttgggagcaagtcagcagaaggtagctaagggtaagttaagcaagcgggtagtgtctaaaggtcagaagatggccgactatcaaggtattttagaggatttagaagcacagggagctattactgtctctaaaaaaggttctgctattagttatactctcacatcaccaacgggtttagaagtgttgggtgcgggtttgcgtagtaaagagtttaagtttgagggaactattgttggtacttgggctgctaatgcgttgttgcggtggatcagtgatattgatgttgtggtaggtgcgccggttgcttcaggtaatggggttaagggtggggtgattggttcttatgaggagtttaaaactgtagctttagatgtttatgataagttgaaccaggattacaacctagatgatttagtacctatttatcgcattagaagaggacttaaatttagttaaataccaattccagcaaactttagcagatagtttgagtaaaactggaagtcaagaagtcatgcaatggcaagaagtagccgcagctatggttagtgaaggagaagaaaatgctcctactccagcagatttagtcaaaaaatttgactctacttataaaaagagattagctagaaatagtaatctcatagatgttctgcaaaacaaggtaatgaaaaataaacctggaacagatccttatattgttagagctattttatggacactctcacaaatacaagtttcctttgcaaaattatggttatctggtgaagatttagctcaatcaaatgctgatgatttgggattacctaatgctactaaaactaatcaagatagagaagcagaagcactcaagaatattcagcaaattttaaatttagtcagtttctataatccagttgtcatttgttttgatgaaatagatgtagaaaataattgtaatgaagatggtttaactacagaattagtaattgccaaccttgtaaaaattcttcatgatactttggaaaattccgaacttggacaaggtgtggttattctcacagtaatgaaaacagaaacatggaaagatgtaataaaacaacagcaaaaagctacattagacaggctttcaaaatatacacaaataaaacctatagaattaaaacctgttaatgctgattctatggtgcaattagtaactgtttggttgcaggaatattacagttcaaaaaatttaattcctcctcatccactttacccatttgaagaagctcaactcagagaatacgggaaacttaaaccaaccgttagggaggctttgcgatggtgtgcagataactttaaggttgaagaacaaaaacttcctcctgatccattagagaggtttgaattagcatttcaaagggaaagtgaaatcaaatttgaagaatatatagaagatggttctcttattgcagaagctctttattttggctttaatactttaaaaggacaaacattagaaggagtaataattgaagaaattaacaaagatattttacctaaatccaagaataacaattttataaaattcaaaattatcggtaatgaaaatggtaaagaagtaaaaattggtgtagcagttgtccaagattctcaatttacattaaatgcagctttaagacggttgaatgactatcatacttttgatttaacacgtggttgtttagtccggtctaaatcgaaaatagaacaaatgaagaaaaattcagaagcatataggttgctaaatgaacttatctcacaaaaagggggcgaaaatgtagacttaatagaagatcaaattcgcccactcatagcaatattggctatttatcaaaagcggcaaaattaccaactaactgagtatcaaatttttgattttatctctaaaaacaatatcacatttgataatttgttattaaaagagattctcagtgatccatctggtaatatgccaaatgttaataatgaagatgatttaagtgatttatttggagatgatgaagatgttaacacgcctgatgttgatgatcaaactgaagatgatttaagtgatttattaggttaattaattatgaataaatcagtttcaatttataatgcaatatgtctaccagcccctgatattgacgctttaacacaagggcgaataattgctgctataccccggatatttcttactccaggtaaaacattcgctctctatcctgtggaaatatctacagtagaaattgataaacattaccggacaaacttcttaaccactgctaaaactgcatggaaaaaatttcataaaccaggtattttactacaacctcaacagcttaatttaattgaaactgatcaacagttacaattacctttatctgaaagtaatgttttgattaaagcatgggctaaatgtgaactttgccgaactttagatcaaaccgattcactagatattttatctcaattaaccatctggaaacaagaaagatttgatgacatattaaaaaaccgtccccattttttccttgcttatttacgagtttatcatttagatcaacctttagaaattccagctattcccaacattcaagaaaaactaggaaaatttgcccccttacctaataacatttctgtatctgaagctaaacccgtattaagtgattatgtatttaaccaacggaaaaaacaactagaaaaccgtcaacctcccctacatcctgaactggaagaattacaaagtttattattatcgatagctactaataacgcagcagcacaacaattagaacaggaaattagagtatttttaggatggagtagcaaacctgttaaaaatcccctaaattctgatttaacttggattcaaacaattgcatctttaggagatagaagcatagaatttgaagagaaaaaaagtaactatcaagcgggtacagactttgaaaacatctcccgtaaaagtttagagtttctaggttttaaagtagaaactgcttataaaggaggtgcgggaggtttagatttatattgttctcaaccctatcctttagtctgtgaatgtaaagcaggtaaaagcattccagatcgtgcagtagaagaattagatagaattggtaaaagacatctgcaagaaaattatctgcaagcagtacgtttaattatcggacctggtgaacctaccaaacaactgaaagcatctttagttaaatctgctaaaatatctaaaaccagtgttattaaagctatgacattacaaaaattagtagaattaaaagcaaaatatccaggtgcaataaacctaatggaattaaaagaatatttagaaccggggcaaatagatgataaaattaacgaatatatagaaaaagtagaacaagaaataaaattgcgatcgcatattatccaagtattaaaaaactacttacaactttcccaaaatgaaagtgcaaaagtagaatcacttcatgcaatatatgtgacttctacaccaccacaaaacttagatgaacgagaattatacgatcttctcatagaactatcatcaccattaacaggttatttaggaagaattaaagaagatgattggacaaaagatcgcttttattacttacgcgacttagcaataaattaaaattagactaaacttagatatatattgctgctgtgtagtataaatttgaggataacttcaagaagttgaagaggtaaaaagatgagtgtggtgattacagatgaggtcttgcagactattcaaatgtctgacaaggaattaattcaggaaatagctatcttgttgtttacacaagaacggtttactttaggacaagcgagtaattttgtcggtatgaatcaacttgagtttcagcgattgcttgctagtcgcaaaattcctcttcattatgatattgctgaactgagagaggatgtcaagagtttggaagctacaatctggattcgtaaacagttgtgtgcagaaattttatcaattgcaggagaatagcgatcacacaagctcagaaaataaagttgaagatgaagttattgttaatttcatgatttgacaaatcttgacacaacttgcttatgcatacaagatagttcttcctcatcaagattatcataacagggttttctgtccgtgtcaatagatttgactatctctattgcggaaaaacaccaaaaaaaatgatgattgcaaaacgacggattttttgattattgtagagacgttcccgacgcagagagtgtagaataggaaacgctgccttttaatagattagatattttatggctaaaaagagcatgattgagcgcgagaagaaacgcgctaaaatggtggaaaaatacgctgcaaaacgggaagccctgctagaagagttcagatcagcagaatctcccctagataagttagaaattcaccgccaaattcaacaactaccccgtaacagcgcacctagtcgccgtcaaaaccgttgttggttaacaggtcgtcccagaggagtttaccgtgattttggactatctcggaacgttctgcgggaatgggcgcaccaaggtttattacctggggttgtcaagtctagctggtagtcattaacccagggaatagggaatagggaataggtaacagcgaagaggcaggggaagcaggggaagcaggggaagcagggggagattaataaccccatgccccatgcccaatgcccaatgcccaatgcccaatgcccaatgcccaaagtcattgtccacaacaacgatcaattcccagactgtctaagagtagatcgctaacggcgttggcgatcgcaaactctccataaaagcttttagaaaaatcaaaggactgcatctctgtaacaatagcaattaccagagatcctaaatcatcttctccttccatgcgttgcctgacaaaaatctgcgctgcacgttgggcaattttttgattaactacttcgggaagaaattctgtatctagccataacaacagtcgcttttgcaaccattcgccttcttgttgaggattttccgtaggtggtagggtaataggtggaattggctgagtcatgtttgtatatcttaaatagattttgtgtaccaaggtaatctcagaagaagcaggagtcaggagtcaggagtcaggagtcagaaataaaaccctgttttagtctgattttcatcatctcttgatctcctttgtcaccatcctgaacattgccataacagcaagtcgtgttcttctgggggttttgttatgatgttcataaactatggaatatgatgttggtgctattattcgaggttatgctcaaggatattttctcatggctgatgagcatgatcacttgggatggtatggaagtagagaacatactttgattcccttagatgacagattccactatcccaagtcattacaacgagttctgaaccaagaaaagtttacagtagcggttaaccgtgactttatgggtgtggttaatggatgtgctaaccgagaaacaacttggatttctgaagaattaaaaaaaatctactggttactataccaaactggttatgcttatagttttgaaacctggcacggtgatcaacttgcagggggaattttagggattgtgattggaggtgcttttattggtgaatctatgttttataacattcctgaaagttctaaagtagcgatggtgaagctagtagaaaggttgcgagaaaggaaatttttattgtttgacgcacaaatgatgaatccccatttagcccgatttggtgcttataacgttgctactcaagaatataagacgttgctgggacaagctttgcaaacatcttgttcattagaatgatagttgatagttgattaggaaacatcaaattgattacccagtcaccagtcaccagtccccagtcaccagtccccagtcaccagtcaccagtccccagtcaccagtccccagtcaccagtcaccagtccccaatcaccaatcaccagtcactctattccctatgt

SEQ ID NO: 107 - DNA, 12173 bp, Sphaerospermopsis sp. LEGE 00249
  LEGE00249_126
tactttttttgctttggtgagtccatcacaatgccagttaggtacgctcaacatcctgccattatttgccctttaactattccaaatcaagttggatatgtccgttgccgggatttctccgcactaggatgtttcttcacgtagatgtttttttactcactttttcactattataccactgtggctaaagccagtcaatcgttttaatgcgactaaagtcgctatcgacttatccccatgtctaaaagtcaggggcttgcgtctcgtttcagggtcaatatgttattcaaaattaaccaactttagttaacagtaactcgcgggtttctgcttttctgactttcacctggccatcatcatctacatccataatagctgtatcaccttcgatgatctgactagataaaatagcctcagctaaggagtcttccaaaagtctcataatagccctgcgtaaaggtctagcaccataactaggatcataaccttctctgactaccagttccttaaaggctgctgtgacttctaatttgatgcctttttcagttaagcggttagcaacctcacgtagcataatgtcagcaatttgcttgacttcttctttgttcaactgactgaagacgataatttcatcaagacggtttaagaactcaggacggaagtaatttttcagttcttcatttaccaagttgcggatacgttgataacttgcatcagcttggttatcaaattcaaatcctaaactcataccacctttttcaattaccttagaaccaatgttagatgtcaagataattagggtgttcttgaagtctacttttcgacctttggcatccgtaagatgaccatcatctaaaagttgcagcagcatattgaatacatcgggatgggctttttcgatttcgtcgaaaagtagcactgtgtagggtttgcggcgtactgcttctgttagttgtccgccttcgtcgtagcctacataacctggaggtgaaccgatgagtttggaaacattgtgactttccatgtattcggacatatctaagcgaatcatggaatcttccgaaccgaagaaataagccgctaatgctttagctagttcggttttacctacccctgtgggaccagagaagataaagctggcgatggggcgattaggattttttaaacccacacgggcgcgacgaatagcgcgagaaacggctgtaactgcttgttcttgaccgatcaggcgtgtatgtagggtgtcttccaagtgtagtaataactctgattcagattcagttagtttatttactggtacacctgtccaagaagcgacgatctccgcaatgtcttcttcgtcaacgctgggaatgttgagagtttgcaggttttcttctaggtcaagtttggtttgcagttctatttcttcttgacgcagtttactagctttaccaaagtcttgaactctgatagcttctgctttgtctttgctgacgtttttcagttgcagtttcagttctttgttgttgatgatgcgggagtgacgtaaacgcacacgcgaaccagcttcatctattaagtctatggctttatctggtaagaagcgatcgctaatataacgatctgataactgtgctgctgctattattgcatcatcggcaatggtaactttgtggtgttgttcatacgcaccgcgcaaaccatagagaatttcaatagtttctgctactgatggttctccgactaaaatcggttgaaaacgtctctctaacgctgcatcccgttcaatgtatttacggtattcatctaaggtagttgcaccaatacattgcagttcacctctagctaatgcgggtttgaggatgttagccgcatctaaaccgccttctgtaccaccagcaccgacgagggtatgaatttcatcaattaccaggatgatattaccgacggagcgaatttcatccatgatttttttcagacgttcttcaaagtcgccccggaagcgagttcctgccaccagtaaacccatatccagactaattacttctttgtccagtaatacttcaggaacgtcttggttaatgatgcgttgagctaaaccttcggcgatcgcagttttgccaacaccaggttcaccaattaacaccgggttatttttggtacgccgaccgagaatttgtacagtgcgctcaatttcattttgccgacccactaccggatctaatctgccttcttgagctaatttggtgagattacgcccaaattcttctatactcagattttgattacgtctggtattgcgtccgccaccagcaaaaaccgtgttatcttcacctaacacactcatcacggcattgcggatagtttgcaggtcaacaccgagattttgcaatactttggcggctactccttcccccgcctcagttaaacctaacaataaatgttcagtgtttatgtaattgtgtccaagactatgagcttctctgaaggactgctcaaatagactttttacttttggtgtaaaaggaatttccggtgggacaaaaccagaaccccgaccaataattttttctacttcccgacgcgcatctttcaggttaatgcctaactcagccagcactttagcagcaacccctgttccttctcccattaaacccaggagaatttgttctgtaccgacaaagttatgtcccaggcggcgtgcttcctcctgagctaacataattaccctgatggcttcggacgtgaagtgttcaaacatagcgggttcttgctcccttgctgcttggactttgggtgatttaaaggttcaccctgatctaaagtttattgtattttcttaaagataatgtatctttatttaaaattggatggcagtggtgagagccgtaattagctcaggtgtagtagccgtcatttgccagttatggctaaaaatttggctattctggcaactgttgagcctgtcaacttgggtaaagtgaaatcctatcatcggtaaaatttatgacagaatcttccgcaagtaaagatcaacagcatccactctacaaccgcgatcgccctcttattaatagtttactctctcaggaggcaacagattacaatttagctgaattagctcggatgagaatacgctatcaaggctttcctggcgcacgggacattcaacaagacttagataaagttttgcaacgttggggtttaacggaagcggaactttttgccaaaacccgtgaaatacatcaagttggaggcatttataaaagtcgcgggaagaaggaagaggaagattggaattaattacaaggagtcaggagttcaaggagtcaggaggcaggaggcagaaggcaggaggtaggagcaagtcctaagttgacaatttcatagacaaaactatacttgtattgacaaaaatcaatatatttttaggaaaaaatcaactacttgatatataatacggtgatatcaagtattgaattgagactattgccgacgcgaaaaccaagcaatgatggtggtagtctttttcagaaacttaattggaacacaatcgcgtctggctaaggcgtgaaagtctactgagggataactgctcccatgctcccgttgaagtagaaagtaaagtctagttttgtctaggttttatatagcagatagatatttttgcccagtcaccagtcaccagtccccagtcaccagtcaccagtcaccagtcaccagtcccctgtcaccagtcaccagtcccctgtcaccagtccccagtcccctgtcacctgtcacctgttcgctctcttaacttttgcaatagctgttgttgggatgagtctggggtaggtgtaatggtgttttgggggatgttttcggcactttccacagcagcaggtacggtgggagttacggctttttctggggaagatggttcggaaataattacaggtggtaataactctggttgtgtgttgaattggattatttctgtagttggtaatggggtgaaaattactactttgttgattttttcaacagcttttatttctggtttagcagtgatatttttagggatattttccagagattttggtgtttgtgaagcagctttaaaagtaggttgaggtgtgatattttcggctggattcatagatgttttgagagcatctaaggtaaaagctaccttggtttgttgctgcatattttctgtagaagataccaatttacttaaaccattcaccaattgcaaaagattttgccgaaatttcggatcgcctgtgagttcatctaaatcagatgtaattttttgggtattttcaaaagtcaccctagcagcgtctaaagtttgttgcaaaagcacaatattttgcggatcatttaaatttttagaagcattttttaaattagcagaagcttccgcagcgttagcagagagaatttctaaatttttcaataattctccttctgttaaacgattaaccgcaggtgataaactactaactgtttgacgtagttggttactggtttgggtaatattatttaaagtaccgactaaagcagaacgatttgtagttaataactcatctaagttatttaataacttacttgcttgttttgcagttgtactaaattcactcgctgttgtacctaattgatttgcggtttttgtcgttgtggttgtgagttcatttgttgctcgttggatagtgacagcagtattagaaaatgtgcctaattgtccttgaaaacttctgctgacactttgcatttctcgactgagtttagcaatactatcagccgcattcgcagaagttactaaaaggcgattaacgttgtcgtaaaattcctgattattatattgagcagcaaaatcagatgattggcgaatcagttcatcaacgctaattccaatctcaccttttaatttagtagattcgttacaaataatcaaaccaggattacaatctttctctaatggtccagcaatgtcttgaggaacttgtgcattaggtggtggagtaatatcaatgatactttcattaattaatccactttgatttgcttcaattttagaatcagcaggaatttttaattgaggatcgttgatttcaatttctacatcaacagcatttgctccggtgttgatactagaaatactacccactttcacaccacgataacgaactggtgagcctttttgcattcccccagcattggcaaattcaaccacagctttataagaactgcttccgggcgtgattctatttaaccatagccatattaccccaaatgctcctaaccctagtaagattaataaacctaccgatccttctctaaaagttcttgtagaagtgaatccactaattagacctcgcattttttcgcgctccataaaaatagtcctaattcgtaatttgtaattcgtaattcgtaatttgtaatttgtaattcctcattcgtaattcttaattattaatttgtaaatactgtgaagagaaaatagtaaacaaatatttttattttgactccttgaactcctgactccttgaactcctgactccttgaactcctgactcctgactcctaaaatatattatcaaccagccacttgaattggaccatgtatactcccactcataaattgtctaatcaaacggttttctgtatgatctatttcatttactttaccttgccattgcacttttccttgataaagaaatatcaacttgtcagatgttcgacgaatggtactatcttggtgggtaacgatgcagtaggtactacagactccttgtgtacattgcaaactgcggattaaatcctcaattactgttgaagcaataggatcaagtccggctgtaggttcatcgtataataaaacttctgggttatctttgggattatcgggattagacataatcgcacgcgcaaaacttacccgttttcgcatccctcccgaaagttctgaggggtaaagatgaccaatacctggtaaacctaccatttctaatttttcgttgacaagtttgcgaatgcgcgatcgctctaattttgtattctgatacaatgaaaaaccgacgttttcatctacattcaaggagtcaaataaagctgcttgctgaaataccatcccaatactcaccggatcaccaccatcttctattaacccctctcgctttaccccttggatataaatttctccctcatccggctgtaataaaccagctataattcttaaaatcgtggatttaccagttcctgaaggtccaataattcctattgcttctcctttgtaaatttgcaaatcaacatcatctaaaaccttatttttaccaaaggatttagaaatacctcttagttcaattaatggttcttcgttaggtgattggtaattggtcattggtgattggtgatattatataaatagtctaatgactaatgactaatgacagatattatcgtaattggtagcggtattggtggtttatctgcggccgcgttacttgcacgttatggaaaaagggttttagtttgtgaaagtcatactattcccggtggtgcagcgcacacttttaaaagacgcggttttgagtttgattctggtccctccttttattgcggtttaagtggtgatcaaagtttaaatcccctgaaacaaattctcgatgcgatcggcgaatctctcccagttataccttacgatcctttaggacattatcattttcctgaaggcacttttgcagtttatagtaatgctcaacgttaccgtcaggaattagaaaacattacccctactggtgctaaggaatttcaacagtttgaacagcgtcttttgggactttacgacgcaatgaaagatattcccaccatagcattgcgggctgattggcaagtcatacccctattgttacaacgttatttaccttctttgggtaaaatgttgttaaatttgccaattgtgcaatcttctgttggtagtgtgatggatgctacaattaaagacctttgggtaaggcgactaattgacctggaatgctttttattatcaggtttaaaggcattttaagctgttacacagctaaattgtataatcctaatattctgaactcttgtttaacaggcaagatgcctgttccacttatacaaattaaatgcacaacagcttatcttttggcactactattaacaaaaactcctatcataacataaaatgaattctgaaagaggtctattctgtaattttgcggaaaactattgtagttgggtaaaaatgtcgttacttgtaagttagaggtaaaaatcatgaaataaatatttatgcacattatcacccgtcggacactttccgaattttggcaaaagcaccctaactcacaaactagcttgcaatcatggtataaaattacattaaaagctgaatggcaaaattttgtagagttacgtcaaagttttccttctgctgatcaagttggtaatctcactgtttttaacattggcggtaataaatatcggcttattgtgctggtaaagtacaattctcaaaaagtttttatccgtcatgtcctcacccatgcagaatatgatcaggaggactggaaaaatgacccttggaatacgtaacaacaacgcttatcttgaattacttaaatctttcccccctcgtcccattacttctgaggaggaattttttgctacacaaaaggttatcaattttttgattgataaaggtgaattaactcctgatgaagaagattatttagatgttttaggtactctagtttatgagtacgaagaaaagcaaaatcccatacccgatatttatggtgtggagttactgcaagcgttgatagatgaatttaatgtgcagcaaaaggacttagttcctatttttgaaactgaggcgattttatctaaagttttgaggaaagagcgtcttttaactgttgatcatattcacaaacttgcggagttttttcatatttcgccggctgcgttttttgaatcagttagttagatgtagatgaatgaaatatacaataattattcaatggtctgaggaagataaatgttatgtagtttcactgcctgattttactaatgtcatgcagccttgtactcatggggaaacttatgaggaggcttttaaaaatgctcaggaggtgttagaaatgttggttgaatgttggttaaatcttgtttggctgatggtgaacctcttcccgaagcacaagttttaggcaagtctttgaaggtggctcaaaccctaattagtcaggtaaagtaggtgttttttatcataacacctgatagcgaagataaatcacggagcaacagacaaaactttgatttgttatccatccatacagttggaatttgtttgtttaccagatatttatcatcgctattttctttaattttattttctttaattttattccaaatctcgatgtgtaaatgatttcgcattagcaccagtgtaggttttcacaatatgtccatctccacacatttgatatttataagttattaaaccctctaaacccacaggtccacggggtggcatttgttgggtactaattcccacttctgcaccaaaaccataacgaaaaccatcagcaaaacgagtagaacaattatgataaactcctgctgcatttactaatgcttgaaaagttgctgctgctgttaaatcttccgtaacaatagcttccgtgtgtcgagaaccatattcactaatatgagtgattgcttcttctaacgaatcaacaattttcatggctaagattaaatcactgtattctgtttcccaatcaatttctgttgctaaatcaatctgaggtaaaatttttaaagtgctttcatcacctcttaattctacattttgcgattgcaaagcctcagcaactttgggtaaaaattccgcagcaatattactgtgaactaataaagtttcaatggcattacaagccgcaggatattgagttttagaatctacagtaatgttaatggctttatcaaaatcagccgcttgatctatataaatatgacaaatgccatcggcatgacctaaaacgggaatgcgcgtattttcttgaacaaacctgacaaaagaattagaacctctgggaataattaaatctacatatttatctaattttaaaagttctaatatttctgatcttgttgttaacaattgcaccgcatcggggttaacagcagtaccagataaaccttttttaatagctttaactattgcttcacaagaacgtaaagcttcttttccacctttgagaatgacaccattacctgatttaattgctaaagaaacaatttgaatagctgcttcaggacgggcttcaaaaataatccctaaaacacccaaagggcaagtaatacgtttaagaattaaaccagtatcaatttctcggtgaatttggactttacccacaggatcatctaactttcctacatcacgcaccccagcgatcgcatctcttaatttatgttcatctaactgcaaacgtttataaagaggtttagcaataccttccgccatagctgcttcacagtcagccacattagcagccaatatttcatcctgagcagattctaaagctagagcgatcgcattaatcgcttgatttttctcctcagtggaaagcacacccaacctactagcagctaaacgggttttttgggcaatttccgataaactagatgcaatttgtactgtagtcatcacaagaatatatttacactattacaatcttaatattctttgggcattgggttattcatcctcccagtcaccaatcaccaatcaccaatcaccgtaaattgcaatgataacgcagtcgcgagcttccctctcgcacaagtttcaatccctcatagggattattgtaaattgcaaatttgaaggcaatggaaaaataattttagcagatgctgtttcaatccctaatagggagtattgtaaattgcaatattttatctagtcatttgtatcctatttcctttgaggtttcaatccctaatagggagtattgtaaattgcaattcttgcaggatttcaaatatctcactaatttataagtttcaatccctaatagggagtattgtaaattgcaaaattctacaggtatctcgcagataaaaatttatgggtttcaatccctaatagggagtattgtaaattgcaaaaatctctgtagtgtttatatactacagagatttgagtttcaatccctaatagggagtactgtaaattgcaaatgcggcatcctgaaagcctatctatatttagtttttaaggttcgattgcgcgagtggtcccatcataatccatttcaggaatcgtgtcaagagcaaaaaacgcccaaatccagtctgtgtaaggtgcgcgggtgggtggaaaagcagaataaccccaaagtcaagcctatcaagagatacagccatttttttacagcaccaattttttacacccacccatccgcgcaaaacacctgcaaatgtaaacatatataaaagatttagccgtaattgtgtaactcctggaaccaatttaatagcatttaacaaaaagccttaaaattttaggagggtctgatggttacagcaacaagaccacaactacaggtgaaaataggtcctacccaactgctaataaataatgaatgggtggaaagtgtcagcaagaaaaaatttgctaccattaaccccgctacgggtgaggtaatttgtgaagtagcagaagcagatgcagcggatgtagataaggcagtacaagcagcgaaaaaggcttttaatggcgaatggcggcaaatttctgcgactgcaagaggcaatctactttacaggttagcagatttaatcgaggaaaatcttgatgaactggcacgtttagaaactctcgataatggtaaacctatcaatgattctgtaggggatatagaatcagttattgcctgttatcgttattatgcaggttgggctgataaagtccagggtaaaactattcctattaatggtccttatttctgttatactcgccatgaaccagtgggagttgttggtcaaattataccttggaatttcccgttattgatgcaagcttggaaattagccccagctttagcaacggctaatactgtggtgatgaaaactgcggaacaaacgcctttatcagcgttgcgggtaggtgagttaattgtggaagcgggttttcctgctggtgtggtcaatattttatcaggatatggacccactgcgggggcggcgatcgcatatcatcatgatattgataaagttgcttttactggttcaactgaagtcggccatttaattatggaagcggctgcaaaaagcaacctgaaacgggtaactttagaattaggtggcaaaagtcctaacattgtttttgctgatgctaacatagatgccgctattcaagccgcccatgaagcgatattttttaatcaaggacaatgctgttctgctggttctcgcttatttgtggaagcaaaaatttatgatgagtttgtgaatagaagtgtagaaatagccagacagcgtacagtgggcgatccttttgaccccaacacccaacaaggaccccaagtagaccaggaacaatttaaccgagtcatgagttatattgaatcaggtcaacgggaaggggcgcagatgctttatggtggtaatagggtgggagagagaggttattttattaccccgacagtgtttgcagatgtccgcgatgagatgaaaattgcccaggaagagatttttggacccgtgatgagtatcatcaaatttcaagatgtggaagaagtgatccaacgggcaaataataccatgtatggtttagcggcggcggtgtggacacaggatatcaccaaagcccatgcgatcgctaacaatgtccgtgcaggtacggtgtgggtaaactgttatgatgtattcgatgcagccgcaccctttggcggtttcaaacagtcgggtatgggtagagaactgggagaatacggtttacagcaatatacagagattaaaactgtgacagtgaaattgtagatttaacaggagtcaggagtcaggagtcaggagtcaggagtcaggagtcaggagtcaggagtcaggagtcaggagtcaggagtcaggagtcaggagtcaggagtcaggagtcaggagtcagg

SEQ ID NO: 108 - DNA, 12143 bp, Sphaerospermopsis sp. LEGE 00249
  LEGE00249_127
ttcactagtcagcagccttcattccccagtcttcagtccccagtcaccagtcaccagtcaccagtccccagtcaccagtccccagtcaccagtcaccagtccccaattgtggttttccccaaattatggtttcttgtttataaaccacaagtccaggttttgcacctttgggtttatacactcggttgggttgggtgtaaactactggtacttgttcactttcacggccacgactaaagtaagctgctaggttggcggtatattctaagtctgcttcgtctggaactgcaccaggttctaaacgtagtaaaacatgacttccgggtatttcttgggcgtgaaaccataaatcataatctcccgcaacccgaaatgtgagataatcattttggttgttgttacgaccgatcaagacttcaaaaccgctaggggtgcgataacgacgaaagtttgtacttgcggtttcagtgttgctgcgacgacgatattctaagtcttctaaatatttttgttctatgagttcatcgcgtatttcttctaaagcttgtaagtcttctgtattttggtagttctctatttgggaaatagcagcttccacttgttctaaatagtctatttctgcttgtacttctaataatagtggttcgactgctgcacgggcgcgtttaagtttttgatgttgtttgtatagcttttgggcattttggacagcgtttttgtctggttggagggcgatcgccactggttttcctgtctcaaaatcatctaaaataatttctgtcattcctggttgccagttttgcagatgtgccattaacagatctgcttgttgtttgtattcatctgcttgatctgactgttgtaaccggtctttaaaggtttgggctttaatctttaacttacccaaaatattacttaatttctgggttaactgatgacgtagctgagaaaatgattgttgatttaattgatctgtataatattggttgagtaattcttggatatttttggctggtgttattcctccccaacctaaaacagtgtaacccttagcagttaccgcaggttgaaatttaccactttctaaagtttctaaagtttgtaaccattcttgccatttggtaaataacctctcccagtcatcggcagttaaaatatcagtattggtttctggtgatatattggcagcgaataacatagaatctaataaagctgcacttaaaccgctataacttttcaggagttgctttttaatagatccgggaactaaactaactcgttcttgccaccgtgtttgtgattcgtttaaattgggtatagttcctgttagtttgggtggtgtttcgtaaggttcaccagtttgaataggacgaactctagactgttgttgactaacttgatgggcagcggtgataatctcgttatttgcatctgtgagaatagcattactatatttacccattacttcgacgtacaggtgataaagtgctgcttctcctggacgacgggcaaatttaaagtctaccactcgttcccaaggggcgataaaatctatagctattaaagctaaaccacctaactgatggatgagttgttgactgaaagtgaaagtgtctggtgtgcgtggtggtggttcagcaatacaaattcttgtggcttggggatgccatgatatatctagccactcgcgctttttcatggtgcggagggcgatggctatggtatggcgatcgcgttgatatacctgttctgtgcgtgcaggtagccagttagcgcggagttcgctgcaagttgcggtgagggtggtaaagtctacgggttgcaaaataattaataactatgatttttaggtttaagctattctgaattataggacttaggcacagatcacggaataacgaaccacgaaggacgcgaaggacacgaaggaaagagggtttaagagagattttgggttattactgagttattttaagttttaattgtcgaaaatgtgattttttggcaaagctgcgcctaacggcttaaaagcattcttctttctctgtgttctctgcgcctctgcggttcgtttatggattttttagtgcgatcgccactaacaagataattaacaatatatagcaggagtcaggaggcaggagtcagaaagagaaaattaacttttgccttctcactgtcacctgtcacctgtcacctgtcacctgtcaccttactgccagggtgaaggaataggagtagttgacaggactttatcagccattaatcttaaacctgttttaccacaactaggacaggtaatttctagaaattgggatgaggtgacatctacttcactcaaaataccttgtttacagtgccagcattcaaatataactctgctcacgggttgattacagtctaatatcttgatgtgttgggatggggtgggttgactgtctatttttctaggtttggggaattttttgatttcttgaacttccatcgttgtacctgctttactttctatccactttagcctttaggttgggagatcacaaagctaaactcatctgttgttgcacttgatcgggaaaaaggattttcttattaactgcattcttgtgattgtatggtaacattaaattagatgcaaatttagtgtagagttattctcatgattaatttaagtcgagatattcagtcactttcaacttttaaacgcaatactaatgaactcattacgcagatgaaagaaactggaaacccagtagttttaacagttaatggtaaagcagagttagtagttcaagatgctgctgcttatcaaaaattacttgatactttggagaagttagaaactctaattggtatcaaaaaaggattggaagatatagaaacagggaatacacaatctttagatcagtttattgaagagcaagtcctaagttgacaatttcatagacaaaactatacttgtattgacaaaaatcaatatatttttaggaaaaaatcaactacttgatatataatacggtgatatcaagtattgaattgagactattgccgacgcgaaaaccaagcaatgatggtggtagtctttttcagaaacttaattggaacacaatcgcgtctggctaaggcgtgaaagtctactgagggataactgctcccatgctcccgttgaagtagaaagtaaagtctagttttgtctaggttttatatagcagatgcagaaaaaacatggaatttcaggttaaattaactggtaatgccaagttggaagtagaaactgcatgaatttctgtttagtagttcaatggaaattaacgtctatatttttactttactaattgcgtatttatatttaactttctctgctgcttatgatacttgtgtgcgtactacaaattgaagtgcgtaatgtcggttataaataattttgtttatgctgtcagttatcagttatcagttgctaacgactaataactaataactaatagacatttccgggaattacagctattttcaggtaaataaaccacattttgatttaggtttcgcgtcaacaatgtaggggcgttcgcgaagcgtgctggaagcatcagcattcggacaattaattatcggtttttacctaagactatcatccgaatgcttcgccctgactctggtctaaagacatgaaaactgctgtaatgtagagacgttctatataacatctctacaagggttttagaaaacgcacatttaattttcggacaagtctaatgactaataactaacgactaatgactaattgactataatccaggcagttctagtccactagtcaaatcttccatacgttcccgcatagtcgcagtagacttgttgtaggcatctttcatagctgctgttacgaggtcggaaagtagctctgaaccttgtgctattgcgtctggggaaatttctactcttctgggttcttggttgccactaacaattactttaaccagtccaccaccagattctccttgaatttccatttgctctaattcttcttggagacgctttgcaccttcttgaacctgctgtgcttttttaaaagcgtccgcaagttctttcatttttcctaggccaaaaccaaatccctgtccttttcctgctgtcataacaaattttccacttgtgctttgaataacaaatcaaattcaattatagttgggttgggtaattggtaatgggtaatgggtaattagtaattggtaattgggaaaaataaaattgattacccagtcaccagtcacccatcaccagtcaccagtcccctatcaacaaactgcttgaaactcgccaatcattttaacctctggctctaaccaaattgaccaacgttcttgtacttcacgttgaatatgattaatgagacagaaaatatcgctggctttagctccaccacgattaacgataaaattagcatgaagttgtgcaacttgcgctccaccgatttgatagccttttaaaccagcttgttcaattaaccatccagcagtgtaaggcttaggattgcggaaaacactgccacaactgggaaaattataaggttgggtagaaaggcgatgttgtttatgttgtttggttgtagctataacttttgctggatctgcaccgggttggagttgcaaggttgcttgagtaactatccgttttcccccttgcaataatgaagtccgatatttgtaacctaattccgctggggtgagagtttctaatgtaccatcaggagagagcaattccgcgctcaccaacatatctgcaatacagctattatgcgctcctgcattcatcacaactgcaccaccaacagttcccggaatacccacagcccattctaacccttcccatcccaattctgcggcttcccatgccaagctaggaatagattcgcctgcggcgacagttaattgacctgtttctaggtcaaaatgcttggaacgaaaatgacgagtagcaatcactaagcctggtataccttgatcgctgaccaacaaattagaacctgctcccaggatggttattggtaaatcttgttcttttgcgtactcaatacttgcttgtaatgcttctaagttgcgtggagcaacgtaccattgggcttctcctccaactctgtaggaagtaaatgctgataaagaagcctgggttttaattacacaatcagtaccgggtaagtaaattacttcactatcaacagaattaattgtttgctgtttatttgtagtcaaagcagaaatcttacagacgtttccagcagcctgggaagttatcatcgttgctttaattggtaatttttattactcttttaccgtaaaattccggcaataagtttaactaatgaaactattgctagataggaaattcgcacaagaaacaaaacctagaaaacctagaactgtgctttgcttaggatgtggctttagctggttcacgaagtgtagcaattacttcaggaatcgcttgattcagattaccagcacctaaaaatagcgccaaatcaccagaacgcaggtttgacaataaaaactcgcacacagaggataaagtcggttgataaataacctgctgatgctgcttccctatttctgctgctaattgttcaccattaatctgtcctaaatcgggttctccggcgctgtaaatgtcagtgagaactactaaatcagcatgggtaaaagattcggaaaattcttctaaaaaggtaagtgtccgactataacgatggggttggaagatggcaactaccctttgtcctggtctggcctgaagacgtgctgcggccaaggtagcacgaatttcgctagggtgatgggcatagtcatctataaaagtaataccagccgcttctccccggaactcaaagcgccgtcttgctccttcaaaggtagcaatacctttagcaatttccccaaattctaaacccagggcgcgtcctacggctactgcggctaaagcattgctgagattatgccgactcaaaagttgtagatttaatacacccaaggctttacctttttcccaaaccaaagctgttgtaccatcagcacgatagtcaatgttggtgacggtatagtcagcgccagtatctggatgtagactatagctgatgtttgggttaaggcgatcgcgcactgtgtcacaatcaatgctacctactaaaatttggcaaccctcggcaaatttttggaaagtctcaactacttcgtctaatgtttcgtagtggtcaggatgatcgagttcaatattggtaattatcccaatagcaggggcgtgttttaccagagaaccgtcagattcatctgcttcagccactagatacttgctttcccctaatctagcattcccttcccaggcatttacttctccaccgactaaaatggtcgggtcaagaccagcttgccatagcatataaccaatcatgctactggttgtagttttgccgtgagttcctgctacagcaatgctataataatcagcaattaaggctgctaggacatcggaacggtgtaaaataggacaacctaattctatggcagctttatattccaaattactggtattaatagctgttgaacaaattacttgaggtaagttagacttatcaacgggcaatttttctggtgaatttaatactattccatcagccgattcttgaggacgaaagaactccagattgctggcttcttgtctactaaaaatgtgagcgcccagggattctaatttgcgtgtaatctgattaggtcgcagatcagaacctgatactggtaattgccgttttgtcaacacataagctagagccgacattcctataccgccaatcccaatgaaatgaaatggtctaccgctaaaatctatctgactattcatcttttgttcctcttacaccacaccacaaaatcttgacataagacacgcgtatcataacaggattttgatttttacagatactgctcctgtaggattttcatatctgaataaagggttaattttttactttgtttttgcctgttcagaaagatattaccctgacgatagagtttctctatttctgatatctttttatgattattctgaaaactggggtaacatcgggaaaaaaaatcctgtaatgttaaatacatatcgttgatggctttactaaaagtggatacggaattccttgagttacaaacataatttgacactaagtaggtaggcgttaaaaatgatcgttatgacaaggcaggagggaagagacttttaagtaactttactttttgttacatacgttggtttttttgtgcttttctacttaatatccagccagcaggtgaattgactacaatagtacattggtagggaaaagattattcaactagttgcagtaggaaatttgaggaggcaggaggtaggaagtaagagacaaaactttagcagtgtgctttactttacctgaatattcccgcacatcaaatgcagaaactagcaatttttggaggtacatttgacccagttcactggggacacctactcgtagccaaaacggctttgacgcaattacatctagaacaaataatttggataccttcaaaaaatcctcctcataaacaagccgcactgtttgaacatcgagtggcaatgctggatatagctactaaaaataacccagcttttacagtctcactgattgagagagaatgctctgggacttcatactctattaacaccctgattgatttatctgctttttacccaaatactcattggtactggattattggtttggatgctttccaaactttacctcgttggtatcgtggatatgaactagcacaaatgtgtgattggttaattgccccccgacaggtcggtggtgagactatagctcaaagtgagtcaatctgcaaccaagtagaaaaaaaatttagagaaaaatcatatacaatcaattggcagttactgcatacacctttagtaagagtttcgtcaagtatcatccgtgaactttgtcgccaaggctgttccattgatgatttagtaccgaaatcagtcggcttgtacatcgccactcacaatctttacactcataattctgaataaattctgtattttttttgggatagaacactttatagttataaatactcctcccctttgcgatatgattggggtctggaacagaatcaaaacatttactccaatctactcattgagtgaaaaaatctagacttcaacactcaaaggtgtgataattaccctgtttttaggtaataaccaagcctaaagcatttgcacagtagggtgagttacacccaatcttaaagcctgtggactgggtagtgccaacacttccagagtgaagcaggaagtagacaaagctcatgagtaattttgagtaggttttatataacggtcaacgatatcaatttataggcataaatacagagggcaagacactgtgattagagttgcaatcaacggtttcgggcgcattggacggaacttcgcacgctgctggataggtagagagaatagcccagttgaacttgtgggtatcaatgacacttccgatcctagaaccaatgctcacctgctcagatatgactcgatgctgggaaggttacaaaatgcggatattactgctgatgataattccattactgtcaacggtaagaccattaaatgcgtatctgatcgcaacccagataacttgccctggaaagaatgggaaattgatctgattattgaatccactggtgtttttaccagtaaggaaggggcaatgcgccacgttaatgctggtgctaaaaaggtgctgattactgctcctggtaaaaatgaagatggtacttttgtgatgggtgtgaatgatgaagattatgatcacaacgtacatcacattatcagtaacgccagctgtaccactaactgtttagctcctattgccaaggtgctgcatgaaaaatttggcatcatcaaaggcacaatgaccactactcacagctacacaggagatcagcgcatcttagatgcttctcaccgtgatttgcgtcgcgctagagcggctggtattaacattgttcccacttctactggtgcggctaaagcggtagctctggtactcccagctttaaaaggtaagctgaatggtacagctttgcgtgtacccacccctaatgtttcaatggtggattttgtagttcaggttgaaaaacccactattacagaagaagttaaccaagtcctcaaagatgcttctgaaacctatctcaaaggcattttaggttatagcgaacttcctctagtatcttctgattatcaaggtacaaatgaatcttccattgttgatgccaacttaactttggttatgggcaatgacatggtaaaagtgatggcttggtatgacaatgagtggggttatagccaacgcgttttagacttagctgagttagtagccaataaatgggcataatttaggtgacaggtgacagtaagaaggcaaaaggcaaaaggcaagagtttattctttccaattaccaattaccaattaccaattaccaatcacctaactaaaatgctgaaatccctggctaagtgttaaaacttggtcggggattttttcgttttcatgttgtaaaattactgttgagcctggtgtaattttaccgacaatggctgcacctgcacctagtttttttactaattctaatgcggtttgtggtggtaaacagaggactaattcaaaatcttcgccaccatatagggcataattgagcgatcgctcttgacttaaccaatgatgaaaagctaatggtagaggaattttacttgcttgtaaaatagcgcctactttactagcacggcaaatttgtaatactgcatcggctaaaccatcactgctatccatcccagcaattttagattttagattttggattttggattgagattctataatctcccacaataggggtatgacatctaaacgggggttggggcgctggtgtgcggtgattaaagctctcttttcttctgatttgagattttgacctatttcgggatttaagagcagttctaagcctccacgggacgctccatgaatacctgtaacgactatggcatcacctatttgagcggtggaacgacggataataaaatcagggttggcttgaccaaaggcggttatggataaagtggtaatgggcgatcgcactatatcaccaccaactataggaacgttatatttttgcaagcattctgtcatgccctgatacattctttcaacccattcaacgcttaaatctcctggtaaacccagtccaacggtgatacccaagggaaaagcccccatagcggctaaatcggataaattagcagcagcagcacgccaaccagcatcctctggagcagtggtaacatcactaaaatgtacaccatcaactaacatatctgtagttactaccaaagattgctttgattctgtcgccagaactgccgcatcatcacctatcacctctgaaggacagaagcgttgtaatctctctaaaagaccttgttcgccaatatctcgtactcgcaaattttctgctggtaaattagacatcattttgtattaattgaagaggcaggaggcaggaggcagaaggcagaaggcaggaggcagaaggctgaaattttgaatatttgtattttcctattcccactgataactgataactaataactaataactaataacaactaataactgataaaaatgcgaactattgcggaaattaacgaaaaaatcaaccaaaaacgcgccgtagtttggacagttgaagaactgaaaaaacgagtagcggaaatcggtatcaccaaagctactaaagcagttgatgttattaccaccggcacttttgaaccaatggagtccagcggtgcaattattaatttaggacatactgacccaccgatcaaaattcgccgctgttggttagatggtgtaccagcatattctggatttggtgcagtagatttatacttgggtgctagttgtgctgtggaaacgacagagggtgaagaactgagagaacgtggcggaggccatgtaattgaagatttaatagcaggtaaacctatacaagtaagggctttaggacaagttaccgactgttaccccagagcaacttttgaaactactatcacctgtgacactatcaaccaattttatttatttaatccgcgcaatctttatcaaaactttattattggggtaaatggaggcgatcgcccactgcatacctatctaggacccctccaaccccgtttaggtaatgcagtttactccaaccctggggcaatttctcccttattcaatgatcccgatttacaacttgtgggaattgggacaaaaatcttcttaggtggtggaataggttatgtagcgtgggaaggtacgcagcatttccccttacaaaagcggttagctaatcgaacacccattggaccatcggccactttagccttaattggtgatgccaaacaaatggatgcgcggtgggtgcggggttgttacttcaaaagttatggaccatctttgatgttaggtgtgggtgtgccacttccggttttaaacgaagcagtaattgaacgttgtgcagtccaagatcaagacttagtagcgccaatagtagacttttctattccccgtcgtgtccgtcccacctttggtttagttagttatgctcaactaaaatcgggaaaaattcccatagagggtaaagcggtgcgagttgctcctttagccagtatgtttctctcacgacaagtagccttagagttgaaacaatggatagaagctggaacatttaccctcacagaaccagttgctcccattcctagtgaacgagcttttctaccccaggacaggtggacagacttttaatggtgatgggtgatgggtgattggtgatgggtgatgggtgatgggtgattggtgattggtgattggtgattggtgatgggtgattggtgatgggtgatgggtgatgggtgattggtgatgggtgatgggtgattggtgattggtgatgggtgattggtgatgggtgataggtgatgggtgatgggtgattggtgatgggtgatgggtgattggtgatggg

SEQ ID NO: 109 - DNA, 12138 bp, Sphaerospermopsis sp. LEGE 00249
  LEGE00249_128
gggtggttctgtttgtgggggaaggggaggagagtaagtcatttgattttggattttagattttagattgctgataagttctttaacttagccattaagccacaaccgcatttgtatctaacagataacgatcaccattcatctcttaaagacctttgcatttcaactgcatctcctcgccaatttaaacgcccgattaaatcagagaaatcatactttttcggtttcttatcagttgaaatagctaaacttttcacattctcactatcagaatttaaagcatactgtttttgtagtaattctgttaaatctgaagataaatcccctttaagtaaggacattgctacctgtgcttgttcatctggtggtaactgttttacaactgcaatcagttgttctagggtaataggaatagatatcattgcatcttgaaatattgtttacttaattaaattgtaaagctatttaaaaccattttgttgccaatcctgtaaaaaatccttaaaaagaaatcatcctgtaagtcctcaaatcctgtacttcgacttcgctcagtaaccagacatcctgattcagacaatttcaatttcctatgtcagcaataacaagataggggtttggcatcgctaaacccctacatattgtacctactgactcgctttttctgttaacttagtcaacacatcattagacctttccacaaaagacttcatgccctcagcgtcaaagcctttttgtgacatcaacgctaaatcataaacgtgctgacaaatcatttttgttaactgcgctgtgggtgattctccatcaccttgaataatacttccttggttcaaggttaacaagttttgaatcaaaggatgggcggtatttactaacaaaatatgatcttcaggaaattctgcattttgctgttgcatcatggcgttcatatctcgcaaacgacgcaaaatttctggtaacaataccattgctggtggtgttccttggggattatctgattttaacgcctcggtacgaatattaacttttggtttgttgagtgatttttcaaataattctttgataatttcactcttggttttgttggttgtggggtctacaatttcccctgatttatcatctaataatgtgttatcaatgtcagagtctacccgtgtaaatttaacgtcctgatattctctttctaggaagttaataaagtgggtatcaatgaaggagtccataaatagaacttctaaaccttggtttttgtgaagttctacataagtcgcttgactcgcttcatcggtgcagtagaaaactttattttcgtggcgttctttgttgcgttctaaatattctttgagggtggtataaggtaaactggtggtgtttcctggggtgacatcttgccaaacatcactctcagaagattgtacttctactgcgggtatttctgttttttcggcttctaatttggcagtggtgcggaaaacgatgatgtcttcaacttgtttcttaaatttctcatcgttgagaacaccaaatttaacgaatgtgcctaaatctttccaggcgttgatatatttttctttgtcggtgcgatataattctttcaagctatcgccgacttttttagcgatgtaatcaccgatttttttaactgtgcgatcgccttgtaatgcactccgggaaacgttcaaaggaatatctgtactatcaattaccccccgcataggtagtaaaaattgaggaataatttcatcacagttatcacttacaaaaacctgattacagaataactttgtttgtcctttagtgacatccacatcagggcgcattttcgggaaatacaaaatcccgttcacaataaaaggataatctgtatttagatgcacccataacaaaggttcttcttggaaaggataaagatagcggtaaaattctaaataatcttctttagttaaactgctagaagattcgcgccaaggtgctttttgtttattcaaaacttccccatctaatttgatgggaactggcataaaatcacaataggttttaactaaattcttaattctcgcaggttctaaatattcttcctcatcaggcattaatgttaaagtaatggtagtaccgcgagtagtgcgggaagattcatccaaggtaaactctggtgaaccatcacaactccagtgaaccgcttgagaaccttctttgtaggaaagggtatcaatttctacttttttcgccaccatgaaggaggagtagaaacctaaaccaaaatgtccgataattggttgatcggcttttccttcatatttgtgaataaattcttccgcactggaaaaagcaacttggttaatatattttttgacttcctctgtagtcattccgataccattatcggaaatggagagagttttgttatctttatctatggcaatggtaatttctggttcaccgatatctccgttgtattctcctgcacgggaaaccattttgattttttggatcgcgtctactgcgttggataccagttcccgcaagaaaatttgatgatctgaatagagagattttttgataattgggaaaatattctcagtatggatactgatagtgccttgttctaacatagttatccgtgtgtttgatttacttgcagataattctaaggatcaattttcgtctatatatgtcttttttgaggtaaggaatacctctaaataatgattcggattacactaccatgttagggggattggtgactagggactcgtgactggtgactgggtactgggaagagaatttgaggtaaacaattgtaacagtattagtggatgattttaagtaattatgatgaaatgggtatattcgactatttttataatcaatttgagcaattcaattcaggaggtttgagttatggaagaattactagaacttcaacaattactgataaatggcaatattcctggtgcattgctgctagttgaagagatgacggaaatgagtaaagatgataagctgaataaaatttttagttttggtaaaattattcttctgcatctaattaaacaagctgcggaaaaacgtaccactagatcatggaatttgtttcttgctaatgcagtgaaagaaattcaacgcaccaacaagcgtcgtaaatcaggaggagtgtactttaccagtgaagaattgcgagaaactttagaagatgcttatgaattatcattgaatggtgcagcaaaagaagcatttgaaggtaaatatgaaactgaagaattagcagtaatggtagataaggaaatgatattacaacaagctattgatttaattttagaaaatgccaagtaaacaaaatagaaagtaagggtttagcaatgctaaactcttttatttatattttatttataaagtatttgaacattttttaagtgtaattatcctatgaattttaacaacattgacaaacaaataaatatcacacaagatggaaaagataatacgataattattaccattccttcccaacccacacaactacaagcaaaccccttcacaccaccccaaccccttgaaggtggactgtttggaggtgaagaggaatgaaactgtatgcagtcataacacgatatcctatcatcctggacatcctgattcagacaattagatgctttgccaaattaagagggagattcaaaacttacatcttcataaacatcatttatagaacattgaaaatctacacttgctaaatgtaaattttcctcctttccataactatacaatacccattgtccttctaaattacgacgaaaaacatctacattgattttattttgactgactaacacatattcttgcagtgtggttaaattacgatagtcagcaaacttatcacctctatcaaaagcttctgtagtaggagataaaacttcgataattagacagggataacgtaaaaagttattaaaggctttatctcttgaatcacaactaacaattacatcaggataataataaatatccattgtttcaatatgtgctttcgtgtcggaaatataagcttgacaaccttttccgcgcagatgatttcttaacatagcaaacacattgccactaataactacatgagtattactagcaccagccattgcataaacttgtccctgtctgtattcatgtttgatagaactggtttcttctaattctaaatattcttcaggggaaatatagttataactaggatttgcaatcatcgaaaatcacctcaataaatatattaggtaatgcaacataatcttgtggggttaattatcctatccactcccacaagatatataaacctacacctcagaagatgcttctactaatttcacattctttttccccacagatactttaactgcttgttttttagagaatgtcaacccgttttcacctttatctataaaaattgtatccccagaaataaaggtattttctaacaatttggtagccagggggttttcaacttcacgctgaattgaccgttttagcggacgtgcgccataaactggatcatatccagcttcaactaaataatcacaagcagcttgggatatttcaaaggaaattttttgttctttgaggagtttttccactcgttttagttgaatacggatgatatggcgcatttctgaacgactgagggtatggaataggattaagtcatcaacgcggttaagaaattcagggcggaagtgcgatcgcaaaccttccatcactttatttcgcatcatatcatactttgaatcatcaccagaaacatcaagaatatgttcgctgccgatgttgctagtcattactataactgtgtttcggaaatctacaccccttccttgagagtcagtaactctaccgtcatctaacacttgcagcaaaatattaaatacatcgggatgggctttttccacttcatctagtaacaccacagaatagggatgacgacggatagcttcggaaagttgaccaccttcttcataaccgatatatccgggaggcgcacccactaaccgagaaacggagtgtttttccatgtactcggacatatccaaacgcaccaaagcatcatcagaatcaaagagaaattgagctaaggcgcgggcgagttcggttttaccgactccagtgggtcccatgaacaaaaatgaaccaataggacgagatggatctttcattcccgcacgggcgcgacgaatagcagcggaaacagcagcaacagcttcttcttgtccaataactctttcgtgtaaatggctttctaatttcagtaatttctggcgttctgactctaaaaggcggttaactggtatacctgtccatttggcgactatttccgcaatgtcagcttcggtcacttgttcccgtagcagggtagaaccttgattttgaatttctaataactgggcttctttaatttctcgttctctttgtactccttctaatttgccatatttcaattgagcagctttgtttaaatcataatctctttcagcttgttcaatttgcactctgagcgcgtcctcttctttctttaaggtgctgatagcttctaataattgcttttctccttgccattgttcgttaaatgtttgttgtttaacggttaaagtggcaatttcctgttctattctgtctaaacgttcctttgtttgcggtgtagctagttcttcacctgataaggatagtttttccatttctagctgcattaagcgtctatcaatggtttctaactccgcaggtttggaggtgatttccatttttaatttcgctgcggcttcgtctactaagtcaatagctttatcaggtaaaaaccgatctgcaatataacgggctgataatgttgctgctgccactaaagcggaatcggaaattttaacgttatgatgtacttcataacgctcttttaaaccccgtaaaatggaaatagtgttttctacggtgggctgatctacatatacctgttgaaaccgccgttctaaggctgcatctttttctataaatttacgatattcgtctaaagttgttgcaccaatacaacgcaattcaccacgggctaacataggtttcagtaaattacccgcatccattgatccttgttggttagaacctgcaccgacaacggtatgcagttcatcaatgaataggactacttgcccgttggattcagtaacttcccggaggacgttttttaaacggtcttcaaattcaccacggtattttgccccagcgattaaactaccaatatctaaagatatcaattgacggttttttaaagactcaggaacatcaccattaaccattctttgggctaaagcttcggcgatcgcagttttgccaacgccaggttcaccaatcaaaaccgggttatttttactacgtctggataaaacttgaattacacgcctaatttcatcatcacgtccaataaccggatctaattttcctgcctttgcttgttctgttaaatccctaccaaaacgttttaaagctggttcattcagatccgcagattctttttctcctgcttttgtagaaactctttgagtcacgcgaacatttttaatagcggtttctaacttagcaatatcaacatttaaacctttaaatatccgtcttccaatgcgttcatcttccgcaaaagccaataaaacatgaccttccgagatttccccttccttcattctcccacgaatttcttcggctcgatctagcagcaaatctaaatttcttcccagatacaactgatcacttttagctactttaggctgacgtttagtataaccttctaattgctcctgtaaccgaatcggatcaatttccgcacgggctaaaatacctgaagttacactactagattcttctaaaagagcaagaattaaatgttctacttctaattgttgttgttgataagcgcggacaatatcttgagatttaataacagcatcccaagctgtatcagtaaatttatttggatctgtaggctgcatttttaagattttcgattttagatttttaagattgacgattttaggttataaattggtgattggcaaataatcacaagtttatacagacgatggtgatcgtggcgatggtgatggtgggaccaagcccaccctactctaagataagatactttagacgataattactgactaaccatttctgctggggatttttctgtttctgttgtaccgtgagtagccagttgaatcaattcaactttataaccatcgggatcttcaacaaaagcgatcactgttgaaccgtgtttcataggaccaggttcgcggactaccttacctccacggtttctaatttcctcacaggtggagtaaatgtcatctactcccagggcgatatgaccataggcgttacccaaatcatacttttccacgccccagttataggttaattctatcacagtgtggtcgctttcatccccataacctacaaaagccagggtaaattctccacctgggtaatctttacgtcgcagtaatttcatgcccaggatatcgcagtaaaattgcaaggatttttctaggttgcctacccgcaacattgtgtgtaataaccgcatattcaccattttgattaactattatattttatatctcatccttagaggatgtctgactttttcacaaaactggggatattattgttacttattaagtaaattttgtcagtgcttgtgatataatttattttaatttagatggaggaaatcatcatgctttcatcacctttgatattacattttccctcgtcaatgccaatgacagatgaacaattttttgatttctgtcaggaaaaccgtgatttacgcattgagagaaataaatatggagaaatatcaattatgccaccaacaggttcagaaggcggaaatcgagaaggtagaatcatccaacaagtaatgaactggacagatgaagatggtgcaggaatagcattttcatctagtacaggatttaaactttctactggtgcggaacgttctcctgatgctgcttggataaaattagaaagatggaataaattaacacctgaacaacagataaaatttgctccgatttgtcctgatgtggtgattgagttaatgtccccttctgataatttgcaacctttaaaagataagatgtgggaatatatgcaagaaccaggaatacagttaggattattaattgatagaaaaaatcggcacgtttatatttatcgtcctggggaagatgtagaatgtttagaaaatcctgatgttgtgagttgtgaacctgttttaccagggtttgttttaaggatggggaaaatttggtaggtatagatttttgtgaggttgtgctaaaattaatttcacttcagatagagtaactcattatgctttcatcacctttaatattacattttccctcatcaatgcccatgacagacgatcaattttttgatttctgtcaagaaaaccgtgatttacgcattgagagaaataaatatggagaaatatcaattatgccaccaacaggttcagaaggcggaaatcgagaaggtagaatcatccaacaagtaatgaactggacagatgaagatggtgcaggaatagcattttcatctagtgcaggttttaaactttctacaggtgcagaacgttctcctgatgctgcttggataaaattagaaagatggaataaattaacacctgaacaacagataaaatttgctccgatttgtcctgatgtggtgattgagttaatgtccccttctgataatttgcaacctttaaaagataagatgtgggaatatatgcaagaaccaggaatacagttaggattattaattgatagaaaaaatcggcacgtttatatttatcgtcctggggaagatgtagaatgtttagaaaatcctgattttgtgagttgtgaacctgttttaccggggtttgttttaaagatggggaaaatttggtaggtataaataggaagatgcacgttattagttttagaatattgagggaatatatagaaaatcatgcagattctcaggaagcactaaacaactggtataagattgctagtaaagctaaatggtcaaacttaattgaagtacaacaggtttttccaaaagctgaagctgttggtaacttcacagttttcaatattaaagggaataaataccgattgattgttagcatagattatgaaggacaattaatttatattaaatatatcctcactcacccagaatacgataaggataattggaaaaatgacccttacttttaatccagaaaaatacaaagaattattaaacgcatatctccccagaattattaaaaatgaggcagaaaatgaacaagctttagctattgtagaagatttaatgcaccgagaacgcagtcctgaagaaaatgaactttatcaattgttaataacgttaatagaaaagtttgaacaagaatattatcaacctgttcaacaaaataatcctctatctctgttgttgtttcttttggaggagtctgggaaaactaaagctgatttacaagattttttaggtttagaaggtgtggttgatgatattttgaatggtaagcagacaataagtttagaagtagctgaaaagctgggagatttttttcatgtagaagcaggtttatttcatgattagctggtatcttaatcttgtaaattctctaaatcagctaaatcttgtaatctccctgatgcttgtttatttaatttcaaattttctaaatcaataaaattaacaaaaatattatcaatttttatctctattctggcctgataacaggttgtaaagtctattccatctggtgtagtaattaaatcaatgcgattaggaggataacctaattgaataatttgatcagcgcattggaaatcttcagcagttaaacccaaactaccaaaaccaaattccactaatgccttcatcagtttttcagcattttcctgactcatttcgatccaaatatcaatatctttggtatagcgagggtgtccatgaatggctactgcataaccaccaattactaaatactttacttgattatcgtttaataattgtataaactctttgaaatcttggttcaacattgtactgatattggtgatattcctgacgaatttgttctagtgcttctaaacgtttttgatatgattgcttctgccaataataaaaatcgcttttctgttgtttttgattaattttagtaacaactttttccattattcatttcaataaagtgctatccataaaattataactcatgagtagcatcttgcaaacccctgtattttataaatcaatatttccgcttttcgctttttccactttctcaacttgcttaggtacttctattgtgtaaatttaggtacagtttatcctgctattattttaatctcttctgctgttaaattataaagttgataaaccatttgatcaatttctgcttctaatgcggttgtatctgcattcggatctgattttttagctgtgagaatttgatcaactaattgtgtcagaatgtcttgatcaagattagaaatttgaggaatagggatttgttcaaagtattgaggttttacttcaagataacctccacttctgacaacacaaatatttctcaaaaaataccaaattagccgagaattaaggataccaagtaaatactttcccttgacacttattggtaaaaatactgctggtgcattgagataagtacctgattcatcaaaacaaaatttatttgatttttgcagattaggaaatataattttaggttgggtaaacaaatcatagtaagcacagtttcttaattcccaccaatattgacctttgtcatatctttttttagcttttttctgaaaatttaatagatgcttaaaaatacttgagtattgttttttcatcgtttctaaagcgtcatcttctgttagcttaccaaaatttaattgtgtagatttactggcaaatattatcatccatttatcagcagatggagtaacccattttttaatgtctttaccatcaaaaacaggttttaattctggatcattagacatttttttattaatgataaaagcctcatttaaaccagttaatataccacgataacatttaccaaatatatctataattcgattatttttattgagtttatttaataattcttgctcactatcatttctaaaaagccatacctcacctgataatgattgatgagaaattcgactaaaatgttcggggttaaaaagatttaccctgtcatgatatagagttttattaactttaataaaatcaaaactttcatgaacattataagatttggaagcaagaaaaataattgtataagtagtagcttcatcaaatacaactacggaagtaaaatctaaatacttttcaatggtaaaatttttgatcacaaaatctcttagtattttaccagcagttgttttatcataagtattgttaataaaacagaatttaccttgattggctaaaattgaatgtgaaacctcataaaaataataaaatatatctccagcagtagcaaaggtagtaaatttattttttagatagatttttaaatatcctaattcttctgatctaatataaggaggattaccaattactacatcaaaaccaataaaatcaccatcattatttaatacttcaggaaactcaaaacgccattcaaaagcataagtgtaaattttgccattttctatttcttcaatctcaacccgtaacttatcaatttcattatttaactgactaattctttgaacccgcagttttttctcatcttcactttcttctagtaataaggtttgattttccagattgtaaacttccccctctaattgtcttaatttagttttattaggatcacttaatcccaaagttgttttaaaattacttttaatatcgttaatcaatttgttcattgctcttttttgttctcgattttcagcattgcggtaagtttgtacagcatttctataaatttcaatactgcatttacttctatttaaagcaactcgcaaatcagcatctaacgcaaaacgactaattaaagaattaccacattta

SEQ ID NO: 110 - DNA, 12043 bp, Sphaerospermopsis sp. LEGE 00249
  LEGE00249_129
ccccagtccccagtccccagtcacctatcaccctttttcagttccagaaaaatgtcatattgttgactacgattatctttgacagcagttgtcaccccaacagtgtgtattgctgctagtaatgcttgttgactgggagatgcagtattgaaagtaaaacttttaaccgcccgttccatatctaagaaaaactgtcctttgggtggattaagttcagagggaactgtttgttgaaaagggcgagtgctggctagtgtgttgttgggtttaggaacaattgtatcactgacaggagcgcccaaaacgaagaaaagcacatcttcatctaaccaaccatgagtagcagttaaagtcccaaaaggtgaaatccagttcacaacaggtttacccgccacagtagcaggctcgactttaaactgatattgatttttcactacttcatcgagattttgtaaagcagtttccgcagattggcgtaaatttccctgagcatcactagccttaatcataaacactaaaccagcccgaaaattatcaggtgctgcatcttttggcgtattaggaattacagcaactgaaaattcccctttcatccaactgagtaaatctttttctaaatccaaatttgtcaaagattttacactctgtcgcagtttttccggcttgataggtgacaaaggatttcctttagaagtagaaacatagtctgtccacaaacgctgtaagttactgccagacaacatcattaaagtttcactgggaaggcgattttgcatactcccggctttattttctaccgccagcacgcgcttactattggggtttaaccaagaaacaccctttaacctaactccttgtggttctaaggtaatagttcccgccacaccttggttattttgaagttgcgtcagtacctgagcgggtaaacgtcgattaggagccgctgctgctattttggcagctattggtacattgatataaaattgagcaaaaggtttataactgcttgtttttgagaagtttgtggcaaagccttctaatgttgccaaagaagcttgatttttataggcatcaattgttctttcagtggttttagcattatctgtaatcacaataaaatgctgatctattaatgcagccgaaagcttttgtccagcttgttcttgggtttgtttaatcgtgatgccttgataagtgcgctcaatccatttaccttgtttcaatgatttaggttgtgccaaaatacttttggcagtttcgggatttttgattggtaaaatcatcaccattgactgttcataaatctcagcatcagtggctacttgtttagatgttttattctctaatgaaggagctaaaacagcgatcgtaacttcatcccctacccagggttgaatatctttctcgaagttataaccattattagttaacaagcgttgttgcaacttgattaaatttttatccagtgctttttgagtttctggtgtcccaaactcccttaattttttccattgttgagtatctgttgtcaaggaaactgcaaacaaagcatcttgaggaataatatttgcacccactggcaaatttctagataatggttgtccttgggtgaaaaaccaatatgcagcacttccagcaccaatcaataacccagcagttgacagggttacgattaaagacggtttcttttttttcttgatcacactagacacaataggtagtgccattacaagttatacctataaataattgcgaacaaattactgatttgatgttttgaatcaaaccaagctcatttaatctcgctcagattccccacttcttgaagaattagggaatcttattgttaacgagaagaaaaacagtaagttattgttgatagatattttatttaacctgttttgtcaaattcccaatggaatcttgttgaaattaatttgcatcttgagtgagatgtcattccaatacggtgggatagttatcctaattcaatcattactaccactcaactgtgtctgacctaaatatttagttaaataaggcgaaaaaacttcataaattaaggtgagtggttgtccatgatgccaaaacaaataatggcgaccccaaaatggtccagcttgctcaaatcctaactctaaagcttctgagtaaccacaataaattccgcgaatatctctatacaattctgtacggatacgggctaaacttgcccaaattggtaaagaacgattttgcaaaaattcatctacatgactcgcttcccaccaagaagtggcataacccaatcttttaccggaagcagtccgcagccatacctgtcgccgcagtcttggacctggtacggcttcaattaagctaggggcgtggtctgaattgttgccaattaaagacatatctattacgtctacttctgtgggttcacaagtcagtaattgtaaatgtctggttggagaaccatcacctaaaagtagtaattgccaagcaggtgctaactgagtgtgaggtaaacctttttgaatttcctctccttcaccttgccaaataggttttaaacgatgccaagcggttggcagtgtagtggttgtgggcgtaactatagtagtcaattttatttacaaaacttcacctatctctataaaagcacaatcagagaattatgtcagttgcgtaaatcctgatttcagcatatacaatatggaaaaaagactgaattaaatacgatattttatgattaacctagaaaatattcacccactcacagacttcaaacgcaacgtcaaacagtttatcgaacacatcaaagctacaaaatctcctctcgttctcactgttaacggtaaagcagaaattgtcattcaagatgtggctagttttcaacaaactcaagaacgtttacagcttgcagagtcagaattgcaaaagctaaagtttgaagcattgaaacgggatgtagctttaggtgcggaacagttaaaaaatggagaatacagcgaatataacgatgagtctttacccaatttgctggaaaagattaaagcaagaggacaggatcagctaggtaaataaagagttacatgaatagctacataatttcccaactagctgaacaagatttagaagatatatgggtttatattgcccaaaataatcaaatcgcagcagatacagaaatcgctaaaattttcaattgcttcccaaagttagctaaatttcctggcatgggtagaagcagagatgatttgttgccagaactcagaagctttcctgttaaaccgtacatcgtattttacacaaaaattgatgatgggattgagatagttcggatactgcatcactcaagagatattaatagtcaatttacaactgataactaaactattctttccggctttgccatatcccacataccaccccgcaagctatataataatgattatcattttagaaaagcagtaattttaaggttgtatgctgtctgcaaattcaaatactgatcagtcattaaatttggttcagcgtcctcgtcgtttgcgacggactcaaaccctacggaacatggtcagagaaaccacactcacagtagatgacttgatctatcccatgtttgtgatgactggggaaggacaaaaagtagaaattccttccatgccgggatgttatcgttattctttggatctgctgttaaaagaaattgcccaagtgtcccaattgggaattggtgcgatcgctctttttccagttatcccagaagacaaaaaagacgacacagggacagaaagctacaacccagaaggtttagtacaaacaaccgtcaaagctatcaaaaaagccgttcccgacatcatcgttattaccgatgtcgcccttgatcccttcaccacacacggtcatgatggtttagtagatgaaaacggtgttattttgaatgaccccaccgtagaagtgttggcaaaaatggcactttcccaagctcaagccggcgctgattttgtcgctccttctgacatgatggatggtagagttggggcaattcgtaaagccttagacgcagaaggttatatcaatgtcggtattttggcatactcggcaaaatacgcatcagcctattatggaccattccgagatgctttagattccgcgccgaaatttggcgataaaaaaacctatcaaatggatgcgggtaacagcaaagaagcattaaaagaagttgaattagatatcgcagaaggtgcagatatcgtcatggtaaaacctgccctagcttatctcgatattatccatcaagtcaaaatcaatactaacttaccagtagcagcatacaacgttagcggtgagtatgcaatgattaaagccgccgccgctaatggttggatagatgagaaaaaggtaattttagaaaccttaaccagcatgaaacgggctggtgcagatttaattttaacttacttcgccaaagaagtgggtttgatgttgatttaaggaggcaggaggcaggaggcaggaggcaggaggcagttaattatttaggacttacgcaaaatatctctcaaaccctcttaccttcgtgtcctttgcgccttcgtggttcattcttccgtgtaagtcctgttattcattctccccatctccccacacaccctacaccctatgacaaaaattgacttagcaattatcggtgctggacctcatgcactgactttagttgcccatctcttgcaaaaacggcagacaatgaaaggtaaatttgccgtatttgatccgagtggttcatggatgagtcgttggaaacagcaatttgcagctttggaaattccccatttgcgatcgccagcagtgcatcatccccaccctaacccctttgctttaaggaaatttgctgaatctcgttctcaggaactttttcccccctacgacttacccggcactcaactatttgcggatttttgccaggatatcatcgccgaacgacagttacaggatcaggtaattcctttagctgtaaccagcattaaacccctttcagatcatttgcgtcctcaatttcaattagggctgtcagacggaaaaaccgtaactgcacggagggtagtgttagcaaccggtagcggtaaaattaacattcctgattgggtaaatcaaattaaaacagagtatcctgaaaatagactcagccattctcacactgtagatttacggaagtatcacagtttagcaggtcaaagagttttaattctcggtggtggtttaaccagtggacatttagccgtcggtgcaattgcccgtggtgcaaaagttcacttaatgatgcgccgacaattatcagaaaagctatttgacgctgcacccggttggttaggaccaaaatatctgaaaggattttttgagcaaaattggcaacaacgctggaaactcattcaagaagctagaaatgggggttcaataactccagcgatcgccacccaactccgtaaagaaaagcatcgtggtaatattatcattgatgaaaactgtcaaatagtcaaagcagaatggttaagtaataactggcaagtagaatgtgataacggtaatatttacaactttgattatatctggttagccacaggtactaaatttgatgtcaccaccgaaccgttactacaagacattttagccacctatcccatccaaatagtcaacggtttacctgtgttagatacttatctgcgttggcctggttgtgaattatttatcatgggtggtttagcagcattacaagtaggacccacagctagaaacctatccggtgcaagaatggcctgtgaaaaaatcgttccggcaatagttaaacctagtgtagctttttcacctagtattacagaaattaaagccagctaatacaattttggattttagattttggattttagattggaataaattcaatatcatccaaaattctggctcctgcctcctgcctccttgctgtattgttccaaaaaaataaacttcaaacttagtaacattcagacctttttgcgctaaactgataacgattctcatttttttgctatggtcagttcattaacccagtcccaagacagcttaaacgagcaagatagcgacaaacttacacgcattcgccatacaagcgcccatatcatggcaatggcggtacaaaagctatttccaggaactaaggtagcaattggacctgtcacagaaacaggattttactatgattttgactgtccagtcagcatcactaccgatgacttggcaaaaattgaagtagagatgagacggataataaaagctaatttacctattatccgcgaagaagtagaaagagcagaaattcgcgccgaaattaccgaattaaatgaaccctacaaattagaaatcttagaacgcattcccgcatcagaaattatcacacgttactttattggtactcctgaaattgccaactcagaaccttcattgtttgtcacagatattaaacctactaataattgttggtgggacttgtgtgcaggaccccacattaactttaccggagaaattgatgctaatgcctttaaattattaaatgttgctggtgcttattggcaaggcgatgaaaccaaacagcaactacaaagaatttatggtacagcttggacaacaaaagttgaactagaaacttacctacaacaaagagaagaagcactgcgtcgagatcatcgaaaattaggtcaagaacttaatctatttagtattcaagaagaagctggagggggcttagtattttggcatcccaaaggtgcaattattcgctacatcattgaagattactggcgcaaatctcatctagaatctggttatcaactattatatactcctcatgtagcgaatctcgatttatggaaaacatcgggtcattttgacttctatcaagagaatatgtttgactcgatggatgtggaaaatcaggcttatcaaattaagcccatgaattgcccttttcatgttctaacttacaaacatcaactccattcctatcgagaattaccattaagatgggcagaattaggaacagtataccgctatgaacgctctggagcattacatggtttaatgcgagtgagaggctttactcaagatgatgctcatattttttgtttacccgaacaaattgccgaggaaattttaggagttttaaatctcactgagaagattttatcagactttggctttaaaaaatatgaagttaatctttccacccgtccagataaatcagtaggtaatgatgacgtttgggaattagcaaccacagcactagaacaagctttaaatgctaaaggctggaattatagtatagacgaaggaggcggagctttttatggaccaaagatagacattaaaattaaagatgcgatcggtcgtttatggcaatgttcgacaattcaggtagattttaatttaccccaaagattcgagatggaatatatagcatccgatggtagtcgtcaacaacccatcatgattcatcgggctatttttggttctttagaacgcttttttggcattttaatcgagaattacgcaggtgattttcccctatggttagcacctgtacaactgcggcttttacctgtaagtgatgattgtcgagaatatgcaacatccgtagcaaatgatttacaaaaaagcggatttagagtagaattagatagaagtggggagcgtttaggtaaacagattcgcacagcagaactagaaaaaattcctgttgttgctgtagttggtaagaaggaagtagaaaacaaaactttgagtgtcagaagtagaaaatcgggagatttaggggttttgaatttagctgaacttgtcaagtatttacaaaacagcttaaatttgacaggcggttaatttttttgattaatttcaaacatcaacattttcaattcacaaggtttaaatatgaatactgtaacagaatcaactgtaaatacaattccagctattcccaaaacaggaatgcctgtcactatcattacaggatttttaggtagtgggaaaactactcttttaaatcaaattctccagaataaacaagatttaaaagttgctgtactcgtcaatgaatttggtgatattaatattgatagccaattgctagtttctgtagaccaagatatggtagaactcagcaatggttgtatatgctgcaccattaatgatggtttagttgatgcagtgtatagagttttagaacgagaagaacgcattgattatttggtaattgaaactactggagtagcagatcctttacccataattttaacttttttaggaacagaactcagagatttaactaatctagattcaattattaccgtcgtagacgcagagacatttgatcaacgacattttgaaagtgaagcagcattacaacaaattacctatggtgatattgttctgctgaataaaacagacttggtggacttgcataaactgcgagaaatagaagattttatccatgatgtcaagcaaggtgcgagaattttacatactcaatttggtaaagttcctctaccattaattttaggtgtaggcttaacaccaaaagatgagtatattaccgatgatgtagaagatactcacgaacatcaccaccatgatcatgaccatcatcatgaacatcgccaccatgaccatgaacaccatgaacatcatcatcactcccaccatttagaaaatgatggttttgtgtcaatctcctttcaagcagataaaccatttgatgtcaataaatttgagaacttcctagttgaaaaaatgccacaggatgtatttagagctaagggcattttatggtttagtgatagtgagttgcgccatatttttcaactcagtggacctcgttacagtttaaatgctgatgactggaaaacagcgcctaaaaatcaggtagttttcattggcagaaaattggataaaactgaaatttatacaaaacttaacaattgtctgctatgataaataagtgttaaaaaattgcccaaaacagttaatagtgatttctaaggatgatacccagatcccccacttctgcgatcaattcacaatttattaacacgacaataaaagaagtcggggatcttatcactctattaaccaacaaataatttatcaaatccaaagcaaacaatgactttatcaattagtcccgttctcaattctgctgatcaagttgtgtcatctttatccactcagcaacaaccccaagttacagaagcagaaatgatgcaagctgtcagaacattgctgattggactaggagaaaatcctgaccgggaagggttgaaagatactcctaaaagagtcgtcaaagccttacaatttcttaccaaaggatatcatgaatccttagatgaactgttaaacggagcagtgtttacagaaagtgcggatgaaatggtattagtgcgagatattgacattttcagttcttgtgaacatcacattttaccagtcattggccgcgctcatgttgcttacattcctaatggtaaagtcattggtttatcaaaaattgcccgtatttgtgaaatgtatgcaagacgtttgcaagttcaagaacgtctgactttacaaatagctgacgcactgcaaggtttactcaaacccaaaggagttgcagtagtgatagaagcaactcatatgtgtatggtaatgcgtggtgtgcaaaaacccggttcttggactgtcaccagtgcaatgcgtggtgtattttcagaagatgcacgcacccgtgaagagtttatgaatttaattcgacacaatgctaattttcactaaagttaggtgacaggtgacaggtgacaggtgacagtgaagaaaatagagaatataaaacaagttcttttatattcattcctgactcctgactcctgactcctgactcctgactcctgctgtaattaagtaattaatttattcatgatttattagatatgattctcccatctgaaatgattagaaacttaaaatttaactcccaaggtttaattcctgcgatcgctcaagattaccgtgatggtactatattaatgatggcttggatgaacgccgaatcaattcaaaaaaccttagccacaggtgaagctcattattggagtcgttcccgttctgaattatggcataaaggggcaacatctggacatattcaaaaggtaaaagagcttttttatgactgtgatggtgatacaattctcatcaaaattgagcaaattggcgatattgcctgtcatactggtgcaagaagttgtttctttaatgctgtagaaattctgtttcctcaaacataattttaattatcattctaattataattataattctaattataattctaattctaattctaattctaattgctcatgaatataccaagcattaccgttgtagctggattatctggaactggaaaaactacctggattcgtcaacaaatcagagaaatcaaaccttctgaaaaatttgagaaattaatttatttcagtccaggaacaggaaacgtattaattgatcatagttgtatagcatctgaatttccaggaattaaagtttttggggataatcaagaaattgaatttattcatcacatcccagaagcgaatcatatttatatagaattaggttcttatctagaattatcaacaatatcccaaatattagataatctcaattatcgtgcagtcgctattttaccacccaatgataaaaactcagaatatcatacatggactgaagaaattttctatggcgcacctgtggaaataatccacatagaaaatatttggcgcgtgtgtacaactggtcaagttattgatgaaaatagtttagaagatttttggtatgaaataactcatggtgcttatggtgaagttgtccgcgctaagggtatttttgatgtcaatgatggacgttctatatattgtgattttgtcgctggtgttccccaaacagagtttttagaattagatttacccagatatttagaaggtagaccacagcgttttagtggcttagaaatatcaggtacaaatttagatgaaccagcattaaaatcaacattatcagattgctgtttatctgattatttaatttcccaatatcaacaacaagtcaaacaaattttattagaaggtcaagcagtatgaaaatagcaataatgtcatgtattcatggtaataatgaagccttagatgctgtattattagatattgaacaacaaaaagcagaaaaaatattctgtgtaggtgatttagtaggatatggaccctatcccaatgaagttgttaacaaaattcgctctttagatattccgacctgtattggttgttgggatgaagatatagtcgaaggtttgaatgcttgtgattgtagttatccttcattattagcagaaaaaagaggaatccaagctcatgaatggacgaataaagaaattaccccagaaaaccgcgaatttttagccaatttaccttacagtatgcaatggggaaatttagcttttgttcatggtagtcctcatagtaatcatgaatatttattaccagaacttgatgcttttgtcgctttagaaagggttatttctacaggtgcagatgtgctgttttgtggacatactcatgtcccttatgtgagaactttagatgcaggtaatttacaggtacgggttgatatagatagtcataaaaaatcacaaaaaattagttttacatctcctataaagagaattattaatgttggttcagtaggagaaccgcgacatggtagaccgaatgcaacttatgtcatttatgatcaagaaattcaagaggtaacattaagagaagttgcttatgattatcaaaaaacctgtgcagcaattattgaaaaaggattaccaaaaatatttgcttggcgtttagcaaatggtttagaatttgctgaaagagcagatgatcctactcatgtttgtacaaggtgattggtgattggtgattggtgattggggactggggactgg

SEQ ID NO: 111 - DNA, 11802 bp, Sphaerospermopsis sp. LEGE 00249
  LEGE00249_130
aactatcaaaggcgtattgagtgattttctgacaaatacctttttctttaatccatgccaattcaggttttacatgattattaaagaattttttgaggatgtatttgtttggctttaatccatctttgtacaaataagcccaagtccctaaaccccaattataggtaaaccttgctataccagcgtgtttagccattaatatttcttgagttttatttaacttgagttgtgttttgatggataaaagcatttgctgatgtcaacactatactttattatttaattctgacacattttgcctaattttttagtcaacttattccatgtatacgtcaaatacttgtagttttgtatgtacttgtataggtttgtctagtaaattgtcaacttaggacaagctcttaacagtctatggtgtaaatggctatgtccatcagtaatctagggtaatttacagtcaatactgtttggttaagagtttttgtaggttgtgttgaacaaagtgaaacccaacaaacgcttgtaaaagttgggtttcgttcctcaacccaacctacatgatttatatcttattagttgagtgaaaagtattgaatttacagtagacatctccagaaaagaaattatggaacctatttatgggggcaggtcgaagcatttgggatatctagatgtctgatttttccgttaaattatcgcccataagcttcgcccctacaacttatgacacctacaacttatgacaaattaatacattctattttggagatgtctagttactagccgatacaattaagatcctctatcaccctaaaggttggagcggtattgacgttgtagcctagtcatcccaagactgcaccagctaaagcagttgcgattagggctgcttctggttggtgcatgaatgctttttaagctagaactggtacgggaatttctaggtgaggatacaggggaaagcgatcgcacaatgctgcgactcgacgacggcaatcttctgctactgttttagaatctggggaaagtaggcgatcgctaataatattaccaatttctgtaaattctgccactcctaaacctcttgtggtcatggctggtgaacctaatctcaatccactggtaacaaatggtgattctggatcaaaaggcactgtatttttgttagcggtgatatttacctcactcactaacctatctgcttttttacctgtcatacccacagaacgtaaatctactagcattaaatgattatctgtaccatctgatactaattttaaacctctattttgcagttgggtagctaaagcacgagcattttcaatcacgtgaccagaataagttgtaaactcaggtttcaatgcttccccaaaggctacagctttacctgctatgacgtgttctaatggtccaccttgagtaccaggaaatactgatttatcaaactttttcccaagttcttcatcacgagttaaaatcaatccgcctctaggtccacgtaaggttttatgggtggttgttgtcactacatcacaatagggaagggggttaggatgatgccctgtagctactaacccagcaatgtgagcaatatccgcaagcaggtaagcgccaacttcatctgcaatactgcggaatttttcaaagtctatgatccggggataggctgaataaccgcaaattaacagctttggacgttctttaattgctaaatcccgaatttgatcataatcaagctgttctgtctctttgctaactccatagtgacgcacttggaaccatttgccggaaacattcactggtgaaccgtgggttaggtgtccaccgtgtgataggtccatgcccataattttatcccctggttctagcaaagtaaggaatacagcaaagttggcttgtgcgccagaatggggttgaacgttagcatgagcagcaccaaataattgtttagctctgtcaatggctatttgttcaattttgtcaacaaattcacaaccaccatagtagcgtttacctggtaaaccttcggcgtatttgttggttaagacagaaccttgcgccgctagtacagcagcggaagtaaaattttcactagctatcaattctaggtgatcacgttgccgttgtagttcttggttgattaagtcgttaacagcaggatctgatgatttgagaatgtctgagttggttttgttcacgggaattatcctttgataaactggtaaaactgaaggttttgttggcagtgcagcactgtaataacagcgttataactgttattttaattgcctttgaattttgacttcattatttaagctaaaggaattgatactccccacggctaaaagccgggggattcttgaatagtccacaaacgaaccttcaacggtgctatcaaagacaccctactgattccactgaggtctagacctagttttatcgctactttaactaaaatattagctgctccgttagcatcagcatttaataaaatattttttgctgttctgaataatccacgattcacacgctttcctgatgattgccacccttccggttttgcacaaaatgtaggtagcacatcaccatctaaaaatgaagcttttgaagtatatgattcctctgtttctacaaattgaattttatattggttgcataattgctcaatacgtttttttaatttagctgatggaatttgaacaaacttttgattattaagttttcccatatcagtgttatctttttgttttttattccacccaaatacaattgtgccaatgttgttagttaagcaatgattaattaccaatcttgcagctttattaacggcatccctggcttgacgattgcgtttttcagtgatgtgggctaatttctcattccagaatccttgagttttattttctttaatggtagcaatccgtttgttgtaccattgattcattgattttaaatgctttccatcaataataaaacttgttccaatattagaaatgcaagttaaccaattatttatgccgtggtctatccctaatgctctagacttatctagagcaaccgcaacatcaggctgcttgtacacatattcgatgtaaaaacacttgtttctcggtaaaatcctcaattctttaatgcttttaaactcgatatttgacggcattggcaagtaaaaagcatctaatccaaaccacgtttttactttagtgccaagaggaaaccttaaaagcccttcttggagttttacatctgcttttggataagtaactaaagctagtccacctttccgatacccagggagcttagggcgttgctcaactgttccttctttaattcctttaagtaatccgatgaatgaattaaaagattctgcaactgtagttaaacattgttgagcaacgtgtgaatacattgcttgaaaatggacgttgcttttaaataatttatgcaaatcgtattttccaggtatcctgccagttttaaaatacaattgtcttgcgtaataagttccgcaattagcaagtttagctgattctccacacaaaaattccagaatagcagctaaattttcatcaggattgattaagtgttgttggcatccataattagacatttttctgattttcgatattgtcctgtataatagcatgaagttttaatacagattggatgaattattctatacaattttgaatgtggctaaagccaatcaatcgctttaatgcgactaaagtcgctatcgacttatccccatgtctaaaagcctggggcttgcgtctcgtttcagggtcaatattttcatgtatcaaccaagggtttgtaaatttcatctgtgggattttacctataattaactagaaaaatattcgtattaattttgactaagaacaattaatatccaaaatatataatatacaatcaaactagatgcagtgagcaaaaatttgctattttttgcgattgtaccttgatgccaaaaggagcgatggaggtattgcgatgttagttattgtaacggatgatcaaatctttgcccctgagcaagtttgccaatcttgttggcttgctaacaatagcggtaaaccccgttggtatgagggtaagctgcgttgtggtcaagctattcgccaatttacagaacagcaagcagagcagtttgagtgtatgatgggtttccgactcgccaatataaaataatctaataaaataatctaataaaataatctaatttatcagcaatatcaagcaactgcgttatcataacgctcaaatagctataaaaatttagccataggagaattgaccatgaattggcgcggatctactactgttcctgatcgaatttttgcttgtttgccttatttactgcctttgattgacagtttaatctttggtagctttttgttgagacagtttccattcttagaagtgctgttgttgcctgttttaccagttcaagcagtttataatgccttgggtccgataggccaaatagttgtgttttttggactgttcatctttgtggtgagaaatgagaaaatcaaccattttattcggtacaacgccatgcaggcaattcttttagatattgtgatatttttggtttccatactgctgcgaattttaactcctatccctggtgctggctttgcaattgaaactttagccaatactatctttttaggtatagtggcatctgttgtctattctgtattccagtctttaaatggccgttatgcagaaataccagccatttctgatgctgtttatatgcaggtgcgttaggttaaataccaattttagattttggattttggattttggattaacagttttgaagatcagctgttcccaaaatctcaaacaataattatcgtcggataactatgttttccaggcggccaataccttcgatttccacacggacgcgatcgcctatatttaatggtcctacgccaaagggtgtacctgttagcaccacatcccctggtaatagtgtcattacttgactgatataggacactaaatgatctggggaaaataccatttgatcaatacaggcagattggacgggatgaggttgatcattcaaaaaggtttgtaatctcgctcctgggttcaattctcgcacaatccaaggacctaaagggcaaaatgtatcaaaacctttggctcttgtccactgggcatcttttttttgtaaatctctggctgtgacatcattggcaatggtgtaaccccaaattttgctttgggctgcctctggtgtacagtcagaggtgcgatcgcctatcactaacgctaactcgccttcatagtctacccgttgtgactgtggaggatatttgatttccatttctgaggcgatcactgtggtgggtggtttgaagaaaatcagcggttcatcgggtacggaagttcccatttctgctgcatgatcagcataattcttacctacggctacaattttagaaggtgaacagggagctaggagtctgtatttgtccggttctaaaattaaatcagtgggttgcccttctaaccaaggtggagcgtccaaaacttccacgtttagggataattgcagcaaaccatagtaaatttttccttcttgactcttaactcgcacatagcgttgcgccataactttgattaatatccttagagatgcaaatttcggcggatgaggctgatgattttcatcgaaaactggtaagattataattccttgttgcttccgatgttgattttgaccagtaactcatctgttttacttgtataaatctatgtcagcagccttttttgtccataaggtgactaaaaatatatgaccacagtttacgagacaatgtacattctccgccctgatttgggagatgagcaggtagaacaagcggttactaaataccagaacttgttaactgaacagggtgctgagaatctggaaatccaaaatcggggtaagcgtcgtctggcttatgaaatcaacaggcatcgtgacggcatctacatccaatttaactacacagccccagcaggtgcgatcgctccttttgaacgtgctatgagattgagcgaagaagtaattcgctacttaacaatcaagcaggaaataaaagaagacaagtcagctaaagaaactgtagctgcttaaaaagtgctgagtgaggaattcttcggggattcctcccatttagaaaaatttacgtattctaacagttgtcaattgctcctaattgcgatatgttttgaatcaaatcatgaggtaagtgtttttttcatacatatagagtataggaaaggacactataataaatataggacttacgcaagatgtgactgaaaaccttattcttgcgtaggggtaattcatgaattacccctactttcgtttccttttgcgtaagtcctgaaatatttaaaaatatttaaaaaatatttgaaaaatattttattgctgtccctagcacttaccaaagttaatattgtcgcagttattcctaagagataaatcgctgtgagccaatctaacacacccgaaatccaagcactttctactgaagtatcgcagttgcgtcaagagttgcaactaagagaccaattagtgcaacagctatctcaagaactgttccggctggttaagggtaatactagctttattccgcaaaaagctgaacctgagtatgatttgagtcagttagatgctttaaaagaacaactccaagcggtggaagagcaagtaaccttctaccaagagcaaattgcctctcgtgactcggaaatttaccaattacgacagtcagttcaagaattgactgatcgcagtcggatgttagagcaagtagtacaagaattaccacaaatttaccgtcgtaagtttgaggaaagaatgactccagtcagagagaaagtggcaatgttacaaagagaaaatcggcaattacaagctgaactacaaagtgtaagttatcggttagcactcaaaactcgccactcaagtcatagtggtattgatttaccaaatttttctagtcctatatctggacaggaaaatatatctactccgcaaaatgtttagacggatatggtaatgtagaaatttatattcagattaattgtctgattaattatctttttaaagcaagtagtttattgctaaaattaattgctcttcggactaggctgaagggataatttttaattagggttgctgaaaaagttatttaaggagtttctttgatttggaaattttcccaacactaacaaagtggcagcttttttaggctcacagtacctacgggttgctgaataaactcaaaacctggatgaataaagagtttgagggtgataacaaataaaatatgtgcaaggttttggaagctatgagtaggaaagccttgtactttgttggtttttacctcgtttgaaaatacaaaaaactccttgatatccttgaactcctgactccttgaaatccttaattttctaggttttacgtttattcaacatcccctatttatcttttttctgactcctgactcctgactcctgactcctgctgtatcttcaatttttctcaggttttatcaatttgtatcgcctagcggccaaacctctagtcaacctggtaatattttgcagatgcaatagaggttcagcttgctagagcgagaatttaaagggtgattatatccagtaatgttctgtcaatatgacaagcgaaaaaatattcttaaattggctattttccctcagaaaagccgagaatttagcctactgtcaccagactttgcttattgagatgagaaaatatatcttcgcaattgttaactatctcaaacactgaatctaggtgagtaagttccaatactaatcttacaggagcttgcacgttgcaaagaactaagcgacaaccgctttcgcgtacagctttcagtgcttgaactaggggaactaaaccagagctatccatgaattcaacttctgcgagatcgataacccagagttgatcaggttgaggttttactccagccatcttttcactcaaggccttaccaacctgtaagtctatgcttccttggggtttgaacaaaatcacttggcgttcttgtgtaagagtcatgaatttaactgggtagttgaacagggcagttgaaatgttcagaaaatggaaattatatcaatcaagattgagtgtcaacagtgtaaatactgtttttttagtcagataggacttaatgcaattatagtcgatatctatggaactgctacaggaatcatgacaaacgagagtataaaatttgatagatatttccaatatagtcataaatgactgtagatttcggtagccaatttaactgttattattttcttataatttgtgtgtatttttataactttttaataattacatttcaaaaatgtacataatatcatgtctatttctatagttatcatatatttacgtgcaggaaatagggaagaaaacaattgttattacaagaaattaacctgaaattataagtagaaggaattgaaaaaaccgaatggtgaaaagcaatgatcaggtttttgtcattatcaacgtcaataatcaattaccaattatttgacagcctaactccagacaagccaaaatatagtaaaagtaaaaatttgtaaagtcggcggtgctggatgtcttttgagctattttcactagaaaacatccaagaatttgctcaatcttacggttattgggctatttttttgggaattttgctagagaatttgggcattcctcttcctggtgaaaccgtgactttagtgggcggtttcctagctggtagtgatgagcttaattactggctggttctgggtgatgctgttacaggtgctgtaataggcggtactttcggctattggattggtagggttggtggttggccgttcctgttacaagtgggaaagatattccgcatatctgaaacccgactgctgagtattaaagatcaatttagtgaaaatgctgctaaagccgtattttttggtcgttttttcgcattattgagaatttttgcggctccacttgcgggtattgccgaaatgtcttttggtaaattcctggtatataacttagcaggagcttctgcctgggctggtgtcatggtgactttagctttctttgccggcagaattgtttccctagaacaattagtagcttgggtaagtcaatttgcaattttggcgttacttattctagttgctgtgattgttatacctatttggtgggaatcacgccaagttaagcatttgggggaataggtgattggtgattggtgattggtaattggtaattgggaaaatacaaataattttccccctgctccctgctccctgctcccctgcttcttccccagtccccagtccccagtcacttaagactgcgcccaaatgcgggttggtagtccccagacgtaaataaagccttctgcggctttgtgatcaaattgatcttctgctccgtaggtggctaagtcgggagtataaagggtgttatcgctccaacgtcctactatggtggcgttacctttaaacagttttaaccgcacaacacccgaaactttttcctgtgtttgttgaataaaagcatcaacagcggctttaagtggactgtaccaaagtccgttgtatactaatttggtataggtttcttcaataccccgtttgtattgagtaacatctgctgttaaagtcaggctttctaaatcacgatgggcattaattaacaccaccattgctggtgattcgtaaatttcccgtgatttaatgcctactaggcggttttcaatcatgtcaatacgcccaataccgtgattgccaacgatggtattgagttcttgaattagctgaactggtgtttttgatgtaccgttgatggtggtgggaatgcctttttcaaagccaatttccagatattccggttcattgggagtatcagctatggctttagtcatttcataaatttcttctgggggttcgttagctggatcttccaaagtaccagcttcgatactgcgaccaagtaaatttttgtcaatactgaagggagaggatttttttacgggtgcaggaataccaaactgctcaccataagcaatagtttcttcccgactcattccccattctctggcaggtgcaagaatttttaagttggggtttagtgctgtacaggaaacatcaaaacgtacttgatcattacctttaccagtacaaccgtgagcgatcgcatccgcaccatatttttcggctgtttctactaataccttagcaatcaaaggtctagctaatgcagttcctaaaggataacgattttcatagagtgcattggcttgaattgcgggaaatgcgtaatcttggacaaagctatctttgacatccgctactagagattcacttgcaccagattttaaagctttttctcgtactggttctaattcatctccctgacctaaatctgctgctagggtgattacctcttcaactccccattcttctttaaggtaggggatgcaaacagaagtatctactccaccagaatatgctaagacaacctttttggcgcgacccattagtttctccacttaggaaaacaaacaatgagtcattattatatctaaacttaaccatgtatagtttttttatgcaacaaccattgtcatggaaagctgttaattaacctcactacctagtcaggatatgaggagttgagaagactgctatcctgaaaatgaattatgaattatgaattataaactgcccatgacaacttctacagatgtatttacctccatcaaaacctggctttggcaaggcttccccatctgttatcaaacccaaggcactcaaggacctgctgtgattttggtgcatggctttggagcatcttgcggacactggcgcaaaaatataccagttttagcagaaagttgtcgggtttatgcccttgatttgattggttttggtgcttcagctaaaccagaaccaggagagaaaataacctatacattggaaacctggggacagcaagtagctgatttttgtcgggaagtagtgggagaacctgcatttttagtaggaaattctattggttgtattgtagctatgcaagctgcggtcagtaacccagatatagctttaggaactgctttgctgaattgttctctcaggttgttacacgatcgcaaacggctaactttaccttggactaaacgagttggtgcgccaattttacaaaagtttttatcaattgaagttgttggtaacttcttttttagtcaactagctaaaccaaaaacagtaaaaaagattcttttacaagcttatgccaatggggagacagtgacagatgagttagtagagatgctaatgaaaccagcaggtgatcctggtgctgcggctgtttttctagcatttacagcttattctaccggaccattaccagaagacctattacctgtactaccctgtccagcaattattttatggggaacggctgacccttgggaaccaatagatttgggtagggagttagccaattttccccaagtacaaaaatttattcccctggaaggagtgggacattgcccccaagatgaagctcctgaactggtaaatccaattttacaagattggattggcaaaacttaatttttggatttttccagaacactaccaccattgacgatgatggtgatgtcctttatgccagggacgaccccagtatccccagcccggtccaccccagcccggtccaccccaaccggg

SEQ ID NO: 112 - DNA, 11193 bp, Sphaerospermopsis sp. LEGE 00249
  LEGE00249_132
gatattgagcatgattttagtgccttaaagagagccagaatgtatgctccttcaaatacacccttagatgaaatcatccgtgattattgtgtatcttaatgtctcattcttaagttaaatgactataattgaatggaaacgttactcggcgttaagagttcggagcaaagagcttggtccccactcgctggggatattaattgaatggaaacaggtatgaatacttctaaaaaaccacttaaattagaggtgtccccactcgctggggatattaattgaatggaaacaatattatttgcatctttcttatattcccccgctagagtccccactcgctggggatattaattgaatggaaacatttaaattcagagaaaaagcacataaaacaagtagtccccactcgctggggatattaattgaatggaaactcccttcctcgtctttgtgatctttgtagagcgtggagtccccactcgctggggatattaattgaatggaaacctcccacggtataaccatttaaaatcaaatggctatacgtccccactcgctggggatattaattgaatggaaactgaaggagatcaatgatgtcaagcattcttttaaggtccccactcgctggggatattaattgaatggaaacacattagaattgtttcctttgaagagttgttttcgttacccaaagtccccactcgctggggatattaattgaatggaaacgtaaagctaaaaaagcttgcaccttgttgatatttagacaatttcaaaataaaaaaatttctggaactcctaactccctcacgaaaagactttttcaggaaactctatttctcctgatttgacaaagagaacttgtgaagattttaaccattgagagtcaaaagcacccaaatgagtagtagtaattaaagtctgaaaccgatcttgaatagcatcaagtaattgattttgacgggataaatctaattctgctaaaacatcatctaataaaagtaaaggagcttcattaacgacttcttcaattaattgtaattctgctaattttaaagctaaaactaaagtacgttgttgaccttgagaaccatattgacgagcaggagtttgattaataattaattctaactcatccctgtggggtccaacaagggtagtacctcggtgtaattcaataacagaacgttgttgaattttcccgaaaaaagattgtgtaatatcttcattatcatctttttttagtggcacattaggagaataattaatttccagaatttctgtactgccactaatactagcgtgccatttggcagcgataggtgttaatctttgaatagctctgttgcgtcttctaattacctttgtgccggcgttaactaactgtgcatcccagatagctaattctttctcctgactgctgactcctgactcctgacttctttttaagaaagcattgcgctgtcgtaatacttggttatattgatgtaaaatatgggcataaactggttcaagttgcatcaaaagagtatctaaccaattacgacgaacttcaggactaccccgcactaattctaaatctaaactagaaaattctacagcatttaaaacaccaagaaaatccatttgtctgcggactatttcactatttatagctacactacggcggccatttctgcgtaaagttaaagttaaatcacttattcctgagcttctttctaaggtagcattaatttgagcgatatcttcaccatctttaattaaatcacgatcttttgccatacggtgcgatcgcaatgtagctaacaactctaccgcctccaataaattagattttccctgagcattgttacccactaaaatagttttaggggcagtaaaatctattttttgctcttggtaattacgataatttcttaggtgtatatttttaagatacatatttaagcattaaggagtcaggagtcaggagtcaggagtcaggagtcaggagtcaggagaaaaatcatcaaattttgactatttactatattctcttatttaggaattagtaaaaaatttgttcagcaaaccattttagtcatttaaacatagtaataggtaatattgattgattattaccaattagcaattacctattaccaattacctattaccaattaccaatcaaacattcttcttgcccataacgcggaagaaaatcttttctccttcaatccaaacaaacatcaaggcactgaaaccaatgcaaattagtaactcattaaaaggcaggtaatgagtaccaaaaaaggctcgcagaggtggaacataaaccagcattaactgtaaaatcgtagtggcaacaacagcccccaatacgaatttattagaaagaggattcatttcaattgttagctgattgttagaacgaatagcgatcgcatgacccatttgggcgagacataaagtagtaaagaccattgtcttccagcgttcgggatttagaccttctccggtagctatttggacgtgagaataagcccattgcatgagaataattgtaataatcgcaaatacaatcccaatccgcaccatgtaagcacccaaacccctggcaaaaatactttcacggggactaaaaggcggacgttgcatcacatctggttctgggggttcgaccgctaaagctaaagctggtaaaccatctgtcaccaagttcatccagagaatttgcaaaggtgagaggggaacaccacccaaacctaaaagtggtgctgaagcaatggtgagaacttcaccgatattactgccgagaatgtatttgataaaccgccgaatattggtataaacaactctaccttctttcgtagctgcgacaatggtggcaaagttatcatctaacagcaccatatcgctggcttctttactgacatctgtacctgtgatacccatagcgataccaatatcagcttgtttgagggcgggtgcatcgttaacgccgtctccagtcatggccacaaatctaccacgacgttgcaaggcttgaacaattcgcagtttgtgttctggggagactctagcataaatactgactaaatcgacttgttcctcaatttcctggtcactcatgcgctgtaattcttgacctgtgagaactctagcatcagcatcagctatacccaagtcaagagcgatcgccctagctgttaattgatgatcaccggtaatcataatgggacgaataccagcttgacgacattctgccacagccgcccgtacttcggggcgtggagcatccaacattcccactaaacccaaccacaccaaatcattttcagaagtgtcttctgaagcttctgggggtatttccgttaaaggtttataagcaaaacccaacacccgcaaaccttgagaagccatttggtcattagcagccagaatttgggcgtgttgttcttcatcaataggaatagagcgatcgcctaaataaatgtgtgtgcaacgagctaaagttaattctggtgaacccttagtaaacattaaatactgttttgagtccacaaaaccagctattaccggatcaaccccagtcatccccggatcaccagtggccactgcttccacttgagaaataacactcatgcgttttctttcagaagaaaagggaaactcagacacacggggtaacttactattccattgatctttttcaataccagctttacccgccaaagtcatcaaagcgccttcggtggggtcgcctaaaattgcccattctccggcttctttttgcagtaccgagtcattacacacagcacaagcaaccaacagggcggatatttctggatgttcttctaaatcagctttttgtccatctaactgaaaatcaccaacaggagcataaccttctcctgtcaccctaaaagttttttgattggtgtagactgactgcaccaccattttattttgagttaaagtcccggttttatcagaacagatggtagttacagaaccgagagtttccacggctggaagtttacgaattaaagcatgatggcgcaccatacgctgagttcccaaagccagagttacagtaataaccgcaggtaaaccttctggaactaccgccaccgccatactcagagaaacttctaccaactcttgtaaatttttccagcctattcccttcactaaatcatggatcagaccaccaccgacaactagagcaaccagcaccaaagaaccagataccaacacattacccagttgagtcatgcgttgttgtaggggagtaggttcactctccaccgactgtaacatggtggcaattttgcccagttccgttgtcatgccggtattggtaacaagcaccttagcccggccttgaacaacttcagtaccttgaaaaaccaaattaatgcgatcgccgagtgacgtatcttctggtaatgtaagtatggcttgcttattgacagcttcagcttcaccagtaagtgctgactctcggacttgcaaattagactgttctattaagcgtccatcagcagaaacctgtacccccgcttccagtagcatcacatccccaggtacaagatccttacccgctacatccgtcagtttaccattacggatcacgcgcactgagggcgaagagagttttttcaaggccgccagagctttttctgcacggctttcctggacataaccgagaatgccattgagaattacaattgccataatcgcaattgtatctttaaatggaacttcaccaggttttaatgtaccttgttgcaacgccaaaaaatctaagaaaccagaaataaaagccacaccaatcagcatcaataacataatgttagtgaactgatctaagagaatttcccaagggctacggccaccctgttcttctagttcgttgggaccgtatttttgcaaacgttgttcaacttcttggggtgttaagccgctgtctgcattgctatcaagcagttctaaagctttatcaacctccaaaccatgccaaactgcggcactttcaggtaaagaatgagcagacatcgtgtaggttacaggaaatggttacaaaattcgatcataatttagtgatggcaggatttccatcaatcatgtattagggatcggggactggggactggggaagaaaattttagattttagattttagattttagattttagattggagttaaccaaaataatccaaaatccaaaatccaaaataaataactcctgactcctgactcctgactcctgactcctgactcctgactcctgactaataactaatgactaataactaataatatgagtttgacactccctagtttgaatgttagccagatgtttgggcaaaaaactattcgaccgtttactgctgctaccctgtatggtattgctttcattaaagataaactcattgctattgactctatcaaaggacatctactagagattgaccccatctctgataacagtaaaattcttaatccccaccaagttaaggaatttacagatgttactggtttagctgtgtgggaagatacgctgtgggtcagccgtggtaatagcgtttatttgtgtaagttgggttcttggggtttggagcattttgttactttaccttatgcggctgatggtgttgcggtttgggaatctactgtctatgttagctgccaaagactaggttatattctgatttttgaccaagatacacgcaaagagattactagattttatgccccaggggtggggagagaaaatttggcagtcagcgcagaaactctctgggtttgcgatcgcactgagcaaacagtttactctatggatcgggcaactggagaagttcgttttagtgtcctgacttcttttgcttctcctacaggtattgctatccacagtcaggatcaaacaacaggtaaggatctgctctacgttgcttactctacagaagagccttatattcgtgataatcccaatgctgatcccaatcatgagctaacttatcgggatatcacttttattcatcctctctactatcactacaacccagataaacgctacgccttatctaatggttatttagtggaaatgtcatacatagaggaaatttcacccttagaagaagtttatttacccaatgtggaatggcgtattgctctcccctcagaaacagaacgccaaaaggtgaaacaagttgaagctattggtttacccttcacagaagaaattattgaaggacaacgggtagctgtatttaactttgatactctcgttcccggtgaacgtcatctatttggctggaaggcacttttagaagttcgcggtattaagtatcgtatcacacccaaagatgtcgaagatttacctgaactgacaccagaattgcaaggtcgctatttgatagatgatgatgatttagcaatggatacaaccattgtccgccgtgctgctcgtgatgctgttggttcggaaaccaatatgttacgaaaaatgtataatatccgcaactatgtctatgatgagttatcctatggtattaaaccccacatagatacaccagacatagttttagaacgaggcgttggttcttgtggggaatatgtaggcgtattgctggctttgtgtcgtttgaatggtattccttgtcggactgtcggcaggtataaatgcccgccctacggtgaacaacagggagttcccctacaacctgactttaatcatgtttggctagagttttacattcctaattttggttggctaccaatggaatctaatcccgatgatataggtgattatggtccttatcctacacgcttctttatgggtttatgctggtatcatattgaaattggcaaaggtgtttcctttgaaactcttaccagtaatggtgaaaggctaaccaaagaagaaatatccattggcaatttggcgattaaccatattcggtttacaattcttaaagaattaccaccgatttaatttgggacttcaaaattgagaacttgtatttagtaatggggtatcaggtaggagcagaattagctcctaacgcccctagatacggctgatctgcctaagttaatcaaaagtttaaggtttaggtaaaaaatttttatgtagcctttaatgaaaatatcagtaatttttcggtttaagctgtaaaatggtgatatgaactgctcatcaggaaatatggaaaataaactttatttaaccattgtttgttaaaactgtatcaatcaagttcacacgcacctattgaagtatgaaaataacgaatcaagtaatttgtaaacggtaataaaaggtgaaaaattggacaagttctgaatctgaaaaaactgtggaacaaacaccatcaggaaaagtgcatggtggtaaacgagaatacctgcacaactaccacgactgttatcaagaagaacagttgatatatcaacatttgctgcatttggtacaaatggaatctccagagcaaatggttggacgttttcgcgctctttttgtggaacgtgcaaattatcctgaaccagaaatcattccaattttagacaaaattaccgcttctaagcaaaaaaaaaatgagtttaaccttttcattaatcgctgttgtcatattttaattaatcggtggtatttacaaccaaatttgcattatgcaattgtggatttaatcaatttgtttgattcaccatctaataggttgggaattaattctttacggatacgagaaattaggcgtttgcgggaactgatacagatttttattaatagtgagcagtatgtaatcttacggcgatttttgcaattagtgaatcaaactcctagagtaaatagtcgtgaagaaaaccagcctttgagtaatttaattcgtcgctatccctatttatatgaacattgtttaattagtgaagattctacttttgaacaacaagaaacagtgagacattttcaagcagaggtacagaaaaaatttgaagtagatttatcacaatatataacttataaagtgcgtcggattcaggttttaagaaacgtttccccagcggaagctaatcggatattacgccctgttgataatcctacattattgagtgataaggatctctacagtacggtaaaacaatttattggtaaaacagatagtaactatacttatcaagagagagcgcagcaattcttacaatacgtgaatcacaggggcaataatttccataattttaagaaagatttacatcagtatctaatatcctccattgatagtaaatatggtcaacgccaatttaatcaacgtttgtcaaatcatttacaaaatatattaccggatgctgatgataaaaagatcaatgattttttggtggtgagaacttgtagccagttattaaactttttagttgttaatagccaagcatcaccgcaacactcaacttttttagatttaattagtaatcaaggttctctagaaaccattggcttgttactaaaagtggtgttaatttgtagtaaagtaaaaccatatttagaaaaaagatttggaattttatttaatcattatgaaaatgcaactacagatgttattgattggttagtagcaactttagagcaattaaatattgccatgagtattcattttggtaatattgatttatcgttttttaagagattttgttagaggatgacaggtgacagtaaaaaggcaggatgttttaaattacaaaattatgaattacgaattattggcgttgaatgtgatttttccgggttaaattgagaaaaatcacagattgagttaaacggacaaaatctacaatgataaccagggttaggtggaaagattttactaaagttattgcttgtagctgcatagttttgtaaatcaatttggtgtttatttgctacattagccaactcaaattccaaagatgctaactcatgattattaatagtaattaaatcagattttttaccaatttccaaattataaaatgatgctacggcagttttcccaggataaagataacgtgcagctaataaataaactaaagcttgtctttgatcaaaatctgacttaccagttttaaaatctaaaatatgcaaagtgctatcagactcaataaaaacacagtccatagctgcgtataaccgaaaacaataattagctttttcaatgaaaattggtttaggaaaaccttcatcaccaggagttaattgcagaatgcgtttatttaacagcaaaggcgatttttgatatttttgtaaaatgtgcagtacccgttgcttgacttgaaaagtaaaattacttaattttaacaactgggctactttttccacaccatccgattgagttaaccaatggagatgatgatgaaattcatagatacccttttgggcaagcataccaatccgctgtggtggtgtagcttgggataataaagcttttacctctggttcatgttgtcgtgctttaatgaatccccttctcatttgacaatgccaatgttcttggcctcttttgggggaaactagggaccaaaggtggtaacttacaaagggtctagcagggattgacattgctcaggtacagtgagagaaattaccttggggatacttgcaggatggtggttgttccacaagctttgcgggatgcttcctcatagtagtgataatgcacgggagagagtagcaaaatgagtaaccctaacaattctggtaaaataaaattcggtactgatggctggcgtggcattattgccgatgattttacgtttcctaatgtgcggaaagtaactagggcgatcgctagttatctggaaactgcctatagtaaagacagaccagttttaattgcctacgatacaagatttttggctgatgagtttgcacggacatctgctgcggttttggcagatttagggtggaatgtgaaaattacggatcgggattgtccgactcctgtgattgcctacaatgcgaaacaccttaattccgcaggggctttgatgtttactgctagtcataatcctgcaccttattgtgggattaaatatatcccagactatgctggtcctgccactccagaaattactgatactattgtggccaatatagaaacggcatcagatgagttaccaggaagtaacccatcggggacgatttctacttttgatccgaagcccgattatttgcattttatctacacattgctggatgtggaaaaaattaagggtgcaaatttaaaagttaagtacgatgctctctattctacatctcgtggctatttagatgaggtgctgcaacattgcggtactcagttggaaagtttccacacttggagagatgtactttttggcggtggtatgccagaacccaagggtgaacagctggtggagttggtggaagctgtaaaagctgataaagctgacttgggtttagcaacggatggagatagcgatcgctttgggatcgttgatgaactaggaaatgttctcactcccaatacagtgctgttggttttagcaagacatttaatcaaaaacaaaggtaagagtggcgcgatagtgagaactgtggcgactactcatttgctggataattttgcggctaaatatggcttgcaaatttatgaaactgcggtaggttttaaatacattggtgagaaaatgcgggaaaccactgttttaatcggtggtgaagagtccggtggtttgagtgttattggtcatattcccgaaaaggatggggttttggctgatatgctggtggctgaggcgatcgcctatgaaggtaaacctttaagtgtgttggttcaggaagctattgctgaagctgatggtcctttatataacaaccgtttggatttacaccttaccgaatctcacaaaaacgctgtaattgatgcttataccaaaaatcctccttccgaagtagcgggaattaaagtgaaggaagtgggaagaaaggatgggattaaactgtatttagaagagggtagttgggtgttattgcgtccttctggtacagaacctttggtgagagtgtacatggaaaccaactcaccggataaactgggtcaaattgcagcgacaatggaagctgaaattgctaagttaggataggtgactggggactggggactggggactggggaagaaaattttagattgtagattttatgttcttttcttgtatttt

SEQ ID NO: 113 - DNA, 11188 bp, Sphaerospermopsis sp. LEGE 00249
  LEGE00249_133
ccgccggccgcgtcgtcttgccgtggtcaacgtgaccgatcgtgcacacgttcacgtgaggcttggtgcgctcgaacttgccctttgccatgactgcttacctctatgtctgattctgttggattcggttggtcggagggcctggatcaggccttcttgatgaccgcttcggcgatgttgttcggagcttcggcgtagtggtcgaactccatcgtgtaggtcgcgcggccctgcgacatggagcgcagggtggtcgcgtaaccgaacatctcgccgagcggaaccatcgcgttgatgaccttgccggacggcgtgtcatcgctgccctgcaggatgccgcgacgacgactgacgtcgcccatcacgtcgccgaggtaatcctccggcgtcaccacttcgaccttcatgatcggctcgagcagggccgggttggccttgctgaagccttccttgaaggccatcgaaccggcgaccttgaacgccatttcgttggagtcgacgtcgtggaacgaaccgtcgacggccttgaccttgacgtcgacgaccgggaagccggcgagcacgccgttcttcatggcctcttcgatgcccttgccggccgcggccacgtattccttcggaaccgtgccgccgacgatggcgttctcgaacacgtagccggcgccgcgctcctgcggctccatctcgatgacgatgtggccgtactggccgcgaccgcccgactggcgaacgaacttgccttcctgcttgatcgccttgcggatggcctcgcggtaggcgacctgcggcttgccgacgttcgcttcgacgttgaactcgcgcttcatgcggtcaacgaggatctcgaggtgcagctcgcccatgcccgagatgatcgtctggcccgactcttcgtccgtgcggacgcggaacgagggatcttcctgggccagacggccaagggcgatgcccatcttttcctggtccgacttggtcttcggctccacggccatcgagatgacgggctccgggaagatcatgcgctcgagcgtgatcacgttgtccatcgagcaaagggtgtcacccgtggtgacgtccttcaggccgacggccgcggcgatgtcgccggcgagcacttccttgatctcttcgcgctggttggcgtgcatctgcaggatgcggccgatgcgctccttcttcgacttgaccgggttgtacacctggtcgccgccgttgagggtgcccgagtagacgcggaagaacgtgagcgagcccacgaacgggtcggtcatgatcttgaacgccagcgccgagaacggctcgccgtcaccggcgttgcggaaggcttcctgctcgttctcgtcgatgcccttgaccggcggacgatccgacggcgacggcaggtagcggatgaccgcgtccagcatcgcctgcacgcccttgttcttgaacgccgtaccgcagaaggccgggatgatttcgccgcgcagggtgcgctcgcgaatgcccgagatgacctcttcttccgagagctcaccttcttcaaggtacttgttcatcaggtcttcggacgcctcggcggcggcttcgaccatgaacgcacgggccgtggcgcactcgtcagccaggttcgccgggatatcggcgtagctgaaggtgttgccgttcgtcgccatgtcccacacgatggccttcatcttcagcagatcgacgacgccctcgaagttctcttcggcgccgatcgcgacctgcatcggcaccgggtaggcgccgaggcgcgacttcagctggtcgatgaccttcatgaagttggcgccggtgcggtccatcttgttgacgaacgcaaggcgcggcacgttgtacttgttggcctggcgccacaccgtctcggactgcggctgcacgccgccgacggcgcacagcacgaacaccgcgccatcgagcacgcgcagcgaacgctcgacttcgatggtgaagtcgacgtggccgggggtgtcgatgatgttgaagcggtgctgctggaacgacttgtccatgcccgaccagaagcaggtcgtggccgcggacgtgatggtgatgccgcgctcctgctcctgctccatccagtccatcgtcgcggcaccatcgtgcacttcgccgatcttgtggttgacgcccgtgtagaacaggatgcgttcggtggtcgtcgtcttgccggcatcgatgtgggccatgatgccgaagttgcggtaacggtcgatcggtgtggtacgtgccacgtcagtaacccttatgccttaccagcggtaatgcgagaaggccttgttggcctccgccatgcggtgcgtttcttcgcgcttcttgacggcgccaccgcggttttccgaagcatcgagcagctcggcagcgagcttgcgcggcatcgagttctcgccgcgcttgcgcgacgactcgatcacccagcgcatcgccagcgccatgcgacgggtcgaacggacttcgaccggcacctggtacgtggcgccgccgacgcgacgggacttcacttcgaccatcggcgcgacgttgctgagggccttctcgaccagctgcagcggctcggcgttcttctggccgatgacatccatcgcgccatagacgatctgctcggcgatcgacttcttgccgctcttcatcaccatgttgatgaagcgggcgacgagttcgctgccgtgcttggggtccgcgatgatttcgcggacgggggtctgacctttacgggacatgaggctttcctaccttgaaatgtggagagcgcgttacttcttcgggcgcttggcgccgtacttcgaacggctctggcggcgcttggcgacgcccgaggcgtcgagcgaaccgcgcacggtgtggtagcgcacgcccggcaggtccttgacgcgaccgccgcggatcagcaccaccgagtgctcctgcaggttgtggccttcgccaccgatgtacgagatgacctcgaagccgttggtgaggcggaccttcgcgaccttgcggagcgcggagttcggcttcttcggcgtggtggtgtacacgcgggtgcacacgccacgacgctgcgggcagttggcgagggccggcgaggcgctcttgtacgtattgggctggcgcggcttgcggaccagctggttgatcgttgccatcagtagggtcgctgcttagggttggatccaggccgatcggcccagggccgacgacgaaaaaaaaacaccggcagaccgggatctccgatctgccgacacgcaatctttgcccgcggcggcctcgtgaagccgatgcggtcccggtgggcgccagaaggcgcagccagcggactttcctgcccatcctgggccgaacacgaggcgcatcctgcgacctcatttcgtgatctgggcggatgaatccgccaatgagccgccgactatacaggagtcggcggcggtttgccaaggcagggccgctagcccggcctaccccgctccgccgttcaggccggagcaggccccggcgccgcgtgcgcggcaccagggtgggtgcatcactcgtcggagccggcgtcggcgctggcctcggccgccggcgagaacgcgcggagcgcctcgaggtcggcgtcggtcagctccgtcgaggcggtgcggcgcttcgcgtggtacgcgaggccggtaccggccgggatcaggcggccgacgatgacgttttccttcaggccgcgcagtgtgtcgcgggtaccgcgaaccgccgcctcggtgaggacgcgggtggtctcctggaacgaggccgccgagatgaagctctcggtggccagcgaggccttggtgatgcccagcagcaccggctcgacgcgggccggcagctcgttgcgcgccgagacgcggacgttctcgtcggcgacgcggaagcgatcgacctgctcgccggccatgaagcgcgtgccgccggcgtcggtgatctcgaccttgcgcagcatctggcgaaggatcgtctcgatgtgcttgtcgttgatcttgacgccctgcaggcggtacacgtcctggatttccttcaccaggtacgcggccagttcctcgacgcccttcaggcgcaggatgtcctgcgggttcggctcgccggcgacgacctcttcacccttctcgacgtgctcgccttcgaacacgacgatctggcggtacttcgggatgagctcttcgtgctcgttgccgtcggcgtccttgatgatgaggcgctgcttgcccttggtgtccttgccgaagctgacgatgcccgaacgctccgcgagaacggccggatccttcggcttgcgggcttcgaacaggtcggcgacgcgcggcagaccaccagtgatgtcgcgggtcttcgaggcttcctgcgggatcttggcgacgacgtcgcccacgcccacttcagcgccgttctgcaccgtgacgacggcgcgcggcgggagcaggtactgggccgggaggtcggtgcccgggatctgcaggtccttgcccttggcgtcgacgatgcgaaccatcgggcgcaggtccttgccggcctggccgcgacgcttcggatcggtgatctcgatcgcggtgaggccggtcaggtcgtcggtcttctcgatggcggtgacgccttcgacgaagtcgatgaagcggacgaagcccttcacttccgacacgatcgggtggttatgcggatcccacgtggccacgacctggccggccttgatggaatcgccatccttgccgttgatggtcgcgccgtagggcagcttgtggcgctcgcgctcgcggcccatcgggtcgagcacggacagttcgcccgagcgcgacaccgccacgagatggccggccgaatgggcgaccgtcttgaggtgggtgaacttgatcgaaccggtcgtcttgacggtgatgttgtcgacggcggcggctcgcgacgcggcgccaccgatgtggaaggtacgcatcgtcagctgcgtgcccggctcaccgatcgactgcgcggcgatgacgccgaccgcttcgccctggttgaccaggtggccacgggccaggtcacggccgtagcacatggcgcagatgccgaagctggcttcgcagttgatcgaggagcgcaccttgatgctctgcacgccggcggcgtcgagcttgtcgacccacttctcgtcgagcagggtgttgcgggtgacgaccggctcctcgtcgttgcccggcaggaacacgtcctcggccacgacgcggcccagcacgcggtcgcgcagggcttcggtgacttcgctgccttcgacgatcggggtcagcgtgaggccggtggtcgtgccgcagtcgacttccgtgacgaccacgtcctgcgccacgtcgacgaggcgacgggtcaggtaaccggagttcgccgtcttcagcgcggtatccgcgaggcccttacgggcgccgtgggtcgagatgaagtactggaggacgttcaggccttcgcggaagttcgcggtgatcggcgtttcgatgatcgagccgtccggcttggccatcaggccgcgcataccggccagctggcggatctgggcctgcgaaccacgcgcacccgagtcggccatgatgtagatcgagttcatcgacttctggtcgaccatctcgcccttggcgttcttcaccttgtcggtgccgatggtgtccatcatcgccttggcgatctgctcgttcgtgcgcgaccagatgtccacgaccttgttgtagcgctcgcccgaggtgaccaggcccgactggtactggttctggatctccagcacttcggcttcggccttggcgaggatgtccttcttctcgttcgggatggtcatgtcgtcgatgccgaccgacacgcccgcacgggtggcgttcgagaagccggtgtacatcagcttgtcggcgaacacgacggtgtgcttcaggccgagctggcggtagcagccgttgatcaggcggctgatggccttcttgttgagctcggtgttgaccatcgtgaaggacaggccttccggcaggatctcggccagcagcgcgcggccgacggtcgtgtcgtacacggtcgacttgcggctggtctcgcccgactccgacttcaccgtctcggcgacgcgcaccttgaccttggcgtgcagctcgacggtgcggttgtcgtaggcgcggcggacttccgccacgttggcgaacaccatgccctcgcccttcttgttctcgagggcgcgggtcatgtagtacaggccgagcacgacgtcctgcgtcgggacgatgatcggctcgccgttcgccggcgaaaggatgttgttggtcgacatcatcagcgcgcgcgcttccagctgggcttccagcgagagcggcacgtggacggccatctggtcaccgtcgaagtcggcgttgaaggccgtacagacgagcggatgcagctggatcgccttgccttcgatcagcaccggctcgaaggcctggatgccgaggcggtgcagggtcggggcgcggttcagcaggaccggatgctcgcggatgacctcctcgaggatgtcccacaccacggcctcttcgcgctcgacgagcttcttggcggccttgatggtggtggcgaggccacggcgctgcagcttcgagaagatgaagggcttgaacagctcgagcgccatcttcttcggcaggccgcactcgtgcaggcgcagcgtcgggccgaccacgatgaccgaacggcccgagtagtcgacgcgcttgccgagcaggttctggcggaagcggccctgcttgcccttgatcatgtcggcgagcgacttgagcgggcgcttgttggtgccggtgatggcacggccgcgacggccgttgtccatcagcgcatcgaccgactcctgcagcatgcgcttctcgttgcgcacgatgatgtccggcgcattgagctcgagcaggcgcttgaggcggttgttgcggttgatgacgcggcggtagagatcattgagatccgacgtcgcgaagcggccaccgtccagcgggaccagcgggcgcaggtccggcgggagcaccggcagcacggtcatgaccatccactccgggcggttgcccgaatccaggaaggcctcgacgagcttgatgcgcttggtgaggcgcttcagcttggtctcggagttggtgctggcgatctcttccttcaggcgaagcagctcggcctgtaggtcgatggtgcgcagcagctcgtggatggcctcggcgcccatgtaggcctcgaagtcatcgccgtgctcctggcgcgcctgcatcagctgctcttcgttcatcagcgagccgcgctcgagcggggtcaggcccggctcggtcacgacgaaggcttcgaagtacaggatgcgttcgatgtcgcgcagcgtcatgtccagcatgaggccgatgcgcgagggcagcgacttcaggaaccagatgtgggcgaccggcgaggcgagctcgatgtggcccatgcgctcgcggcgcaccttggccagcgtcacttccgtgccgcacttctcgcagaccacgccgcggtgcttcatgcgcttgtacttgccgcacaggcactcgtagtccttgatcggaccgaagatggcggcgcagaacaggccgtcacgctcgggcttgaaggtgcggtagttgatggtctccggcttcttcacttcgccgtaggaccacgagcggatcaggtccggggacgccaggccgatcttgatcgagtcgaaatcaagggtcgggcgctgctggttgaacaggttgagtagatctttcatggcttgattctccagtcagtcgcgcgcgatcactgctcgtccagctcgatattgataccgagcgaacggatttccttcaccagcacgttgaacgactccggcatgccggcgaccatctcgtggtcgccgtcgacgacgttcttgtacatctggtttcggccctgcacgtcgtcggacttgacggtcagcatttcctgcagcgtgtacgccgcgccgtaggcttcgagcgcccacacttccatctcgccgaagcgctggccaccgaactgcgccttgccgcccagcggctgctgggtgacgagcgagtacggtccggtcgaacccgcgtgcatcttgtcgtcgacgcggcggttcagcttcagcatgtgcatgtagccgaccgtgaccttgcggtcgaaggactcgccggtgcggccgtcgaacagcgtgacctgggtcttgctgtcgctcatgttgagcagctgggtgtgcgcatcgtcgctcgggtaggcgagctcgagcatgtgcttgatctcggcctcggccgcgccgtcgaacaccggggtggccatcggcacgccgtcggtgaggttcttggcgaggttgaggagctccgaatcgttgaactgcttcaggtcgacgcgggtgctgcccgagatcttcttgtcgtggttgtagatcttgtcgaggaactcgcggaggtcggcgatcttggcctgcgcctcgagcatcttctggatgcgctcgccgaggcccttggcggcgaagccgaggtgggtctcgaggatctggccgatgttcattcggctcggcacgcccagcgggttgagcacgatgtcgacggtgcggccgtcggccatgtgcggcatgtcctcgaccgggacgatcgtcgacacgacacccttgttgccgtggcggccggccatcttgtcgcccggctggatgcggcgcttcacggccaggtagaccttgaccatcttgagcacgcccggggcgaggtcgtcgccctgcgtgatcttgccgcgcttgtcctggaagcgcttctcgaactcggccttgtgggcttcgatctgcttctgcgcgttctcgatcgcctcggccgcgtcgtcatccttcatgcgaagggtgaaccagtcgtccttcttcaggctgtcgaggtactcggcggtgacgtcggccttcttcaggccgttcgggccgccattggccgtgcggccgatgagctggccgggcagacgggcgaagatcgcgctctcaaggatgcggaactggtcgtcgaagtccttcttgacgcgcttgatctcggaatcctcgatctgcttggcgcgcttgtccttctcgatgccgtcgcgggtgaagacctgcacgtcgatgacggtgccgtccatgcccgggggcacgcgcagcgagctgtccttcacgtcggaggccttctcgccgaagatcgcgcggagcagcttctcttccggcgtcagctggctctcgcccttcggcgtgaccttgccgaccatgatgtcgccggcgcgcacttcggcaccgatgtacaccacgcccgactcgtcgaggcgcgacagcgcctgctcggagacgttcgggatgtcggcggtgatttcctccggacccagcttggtgtcgcgggcgacgcaggtcagctcttcgatgtggatcgtggtgtaacgatcctgctcgaccacgcgctccgagaggaggatggagtcttcgaagttgtagccgttccacggcatgaacgcgaccagcatgttctggccgagcgcgagctcgccgatgtcggtcgacgggccgtcggcgaggacgtcgccgcgggccacgcgatcacccacgttcaccagcggacgctggttgatgcaggtgttctggttggagcgctggtacttgatgagcgtgtagatgtcgacgccggcgtcgttggcgccgacttcgtcttcgttcgcgcgcacgacgatacggccggcgtcgatctggtcgacgacgccgccacggcgggcgttcacggtgacgcccgagtcacgcgccacggcgcgctcgatgccggtaccgaccagcggcttctgcgaacgcagcgtcgggacggcctggcgctgcatgttcgcgcccatcagcgcgcggttggcgtcgtcgtgctcgaggaagggcacgagggcggcggcgacggacaccgactgcatgggcgagacgtccatgtagtggatttccgccggcggcttcagcaacgcttcgccctgctggcggcaggtcacgaactcggcggtgaaggcgttcttgtcgtccagctcggcattggcctgggcgatggtgtactcgttctcttcgatcgccgacaggaactcgacgtcgtcggtcaccttgccgttgacgaccttgcggtacggcgtctcgaggaagccgtagcggttggtgcgcgcgtagacggcgagcgagttgatcaggccgatgttcggcccttccggcgtctcgatggtgcagacgcggccgtagtgggtcgggtgcacgtcgcgcacttcgaagccggcgcgctcgcgggtcaggccgcccgggccgagggccgagacgcgacgcttgtgcgtgacttccgagagggggttgttctggtccatgaactgcgacagctgcgaggagccgaagaactccttgatcgcggcggctaccggcttggcgttgatcagctcctgcggggtcaggccttccgactcggccagcgacaggcgctccttgacggcacgctcgacgcggacgaggccgacgcggaacacgttctcggccatttcgccgaccgaacgcacgcggcggttgcccaggtggtcgatgtcatcgacgacgccgcggccgttgcggatctcgcacagcgtacggatgacgtcgaggatgtccgaggtctggccgttcgtggcgatcaggcgcttggcctcttcgccgttctgcgccgagaagtacttgctgtcgaacagcaccgactcgcccgtcacttccttgcgaccgacgcggcggttgaacttcatgcggccgacgcccgagaggtcgtagcgctcgaaggtgaagaacaggttgtggaacaggttctgcgcggcgtccttggtgggcggctcgcccggacgcatcatccggtagatctcgaccagcgcttccagctgggtgcgcgtgctgtcgctgcgcagggtgttcgagatgtacggaccgcggtcgaggtcgttgacccacagcgtgccgaacgaggccacgccggccttgcggaacttggccagaagggcgtcgtcgatttcatcgttcgcgaccgacagcagctcgccggtcttcggatcggcgacgtcgtgcgcgaggatgcggccgaccaggtagtcgtccggcacttccagcgtgccgatcttggcctgctcgagctggcggacgtggcgcgcggtgatgcgcttgccggcctcgacgagcacgttgccgttggcgacgaggtcgaagttcagcgtctcgcccttcaggcgctcg

SEQ ID NO: 114 - DNA, 11184 bp, Sphaerospermopsis sp. LEGE 00249
  LEGE00249_134
gggtggttggggaggtggaggaggtggagtctgtaaaacctgcaaaagtttatcagatgattgataacggttttgatattctgtctgtagtaacttatctaaaatcctacctaactctacactcacaggttgctgtaaatgaacacgccatttttccacccacccataaccttgagttttccataaattccaaggatgcacccttgtcattaaatgaaaacaactcgcacccaaactaaataaatcactcgctggataaacttccctatcttccatctgttctaaagaagcataaccataacttccgatgatcgtacctggacgcattgtaccctgaagttgtttagatgcaccaaagtcaatcaagaataattttccatcactgcgacgacgcataatattttctggtttaatatcgcggtgaatgattttttgattgtgaactatttgcagaactggtaaaatctctagcaacaatttacgaatttttctttcatcaaaagttgcaccattcgctaactcaattaataaattttctccatcaataaaatcttgaattaaatatagatatccgttctcctcaaaatatgcctgaagtctaggaatttgcggatgttgcagttgttgtaatcttttagcttcttcttcaaataactctgttgctttttttaaagcataggtattttgcgtttgcggtgcaagttgtttgataacacaattttcctcaaatttatcagtatcttctgctaaataagttttaccaaaacctccaccccccaaaggtttaactggacggtaatggtttctaaggataactaaaggaatgccacaactaggacaaaactttgtcgtatctgctacggttggattatgacagtctgggtttagacagcatatctgattcatgggagagtttcggtagatacgttacattttagaacatatacaaaaatatactccctaatttcccaattaggtaataaattatctataaattatctataaattatctatttcctcacgccaagacgcaaagacgcaaagaagatatcctgtacatcctttaatcttgatgctgagaatcttcgttcatctgcgttcccaacccaggctgttaaaaacaccatatatattgcgcccacagattcccactcataacataagtgtacaacagtattcacggcttgtcaagtccaaaaacaaaataaacagaaaaagcataaaaaatgtattggatggcttccaatccccaatcacctacctagaaatccacaccctttaattattttgcgatcgcgctaggatgtaatacagttaacggcatagttttaggcgattgagattctatggaacattttcccatcaaagctgtacaagctgcctattacggcgaaaattcctaccgcacaccacccccagacttaccttccctgctattaaaggagagaatagtgtatctgggaatgccattagttcctgcggttacagaattgatcatcgctgaactactatttttacaatccgacgacccagaaaaacccattaaaatctatatcaactctactggaacatctggttacagtggcgaacctatcggttttgaaaccgaagccttcgctatttatgacaccatgaaatacattaagcctcccatccacaccatctgtattggttcagcaatgggtatggctgccatgttgttgagtgctgggacaaaaggttgtcgtgcgagtttacccaactcttccattatcttgcatcagcccaagagttacgctcaaggacaagcaacggatattcaaattcgggctaaagaagttttggcaaacaaagcctcaatggtggatattctgtcacgcaccacaggacaagcaccagaaaaaatcaccaaagacatggatcgtctattctacatgactccttaccaagccaaggaatacggtttaatagaccgcgtgtttgaaaaagaagaactggctaatcctccacttcctgcaagtgtactttaagaaggagatcaaggagtcaggagtcaggagtcaggaggcagaaggcaggaggcaggaggcaggaggtaaatatttttccccagtcaccagtcaccagtccccagtcaccagtccccagtcaccagtcaccagtccccagtccccattccccattcccctattcccttaataaattaaaaatggagtcgtaaaaatgcctataggcgtgccaaaagttccctaccggatgcccggaggacaatacacagattggattagcatttatgaccgtctataccgggaaagaatcattttcctgggcagagatgtcgatgatgaaattgctaaccaaattattgccgttatgctttatttggattccgatgatccaggtaaagatatttatttgtacatcaattcccccggtgggatggtgacatctggtttggcaatttatgacaccatgcaacacatcaaatctgatgttgtcactatttgcgtgggtttagcagcttccatgggatctttcttattagctgctggtactaaaggtaaacgcctagctttacctcactcccggattatgattcaccaaccttccggcggtactcgcggacaagcttctgatattgaaattgaagctagagaaattctgcgaattcgtagccaactgaatcagatttatgctaataacactggtcaagctttgtctaaaattgaaaaagacatggatcgggatttctttatgtctgctcaagaagccaaggaatatggtttaattgaccgtgtgattgaagaacgcatctaaacagggcaaaatatattcaaaattcaaggttaaaaattcaaaagcatcttaactttgaatttttgattttgaattttgaattggagcaaagcaacatggatatcggagattgctaccgtttattggggttaaggtcaggagcttcttttgctgaaattaaagcatcttatcggcgactggtacagcaatatcaccccgatctcaacccagatgatgaaaagtgtaaagaaaaatttattgccttgacggaggcttacaaactcctgcaaacggtagtaccacctgaggaaatagctgtaaaatcacatagttcatcctctttatcctcttcatccccttcatccacttcatcagtgtttgaggatagttctacccagacaccatccccaccgtcagtatcaacaacaacggtgatgccacatccaccgacggtagaggatatagaacagcggttaaagtggaagacttatgaacagttgcagcggtttttacaagaaaaacgttttccccaagcgatcgctctcgttgaagctttagctgctagattaccaggggatatagaagtcaaacaatggcaagctatatcttatcaaatttggggacgggctttaattgcccaaaaacaactgccaaaagctagaatttatctaaaaaaagctatcaagacagatccccacaataaagctctgtttaacgaagttcagcgcgattttgaacggttagggattaagttttaatttatagcaggagtcaggagtcaggagtcaggagttttgaattatttatgggcatgaatataatctacaaagtagaatttaggaatcagccaaagttgcaaccaagtataaattcccattcctaaaagtgcggtaattattaagggtaaacccacttttagacggaaagcatcaggaagaattgccaccccagatacaactatgacaaaataagctaaaagtcctatttgcaaacgttctaaatttttaactgtggttctacaactgctacaatgttgagtatgttgttgataacgatccaacatcaccagacgattatcattgattttagtttctgtatccttaattcccacctcactccaaggtaactgaccatgacaatatttatcaaaccaagtcctaaattcaattactaacctatctgcactggtaggtagtttataggcttttttccaactttcactagattgtttttgttgcaataaatattcttgctgatttaacaaaatcatatcaccatctaacaccacatttctattagtgatatgatcccaccaacggggtgttaaataatgaaatgttttcgcaaaattacgactaaattgaccaacaattctcgattttcctggagatacaggtacacaataaactatcagtcctaatttcttttctgtctgacccagactaatcgcatattctaaacgacaaggtggttcaaaagtgattgttgttggtaaacctctgggaatagaaacttcaattaaatcaattgttgatttaattatattcatagttatgggttgtgctttgtctcgattaccttgtactccatgatgagcaaaaggaacatgactaggatcagctacattttctactagtgtctgccaatcatactctaaatcacggactatagaagtccaaacaaatcctttactagcgtctatttgtggtgataaaggtaaaggtgtctttgctgctagttcgggggtttttgcatctggccacacccaaagtaagtcattttcctgacgtactggtaaagaaaggacacagaaattttcttgatttttaatgacaatttcggtattttcagcttggggaatttgagtacagataccttgatcatcaaattgccaaccatgataactacacattaaattacctgttttgtcatcaatacgaccttcgcttaaaggtgctaaacggtgaggacattgatctaaaaatacccggtaatttgcagatgatctaggtttccaaattactaaacgtattcctaacaatgttaccggggtgggacgttgtggatcaaggtcttcaattggtgtaagaggataccagtgctgaaaaaagttaaattcggcttgcattctatttcttgtaataattcaattaaccagggcgtgaaaaaaatttgagaacaacttttgagaacaattattgtatgtctgaatctgtaatttctgaatctgtaatttctgaatctgtaattactgtaaccgttaaattgttcgctgcttatcaagaagcttatggactttcggaactaatgctggaatttcctcatggtacaccagtcaaagctgtatgcgatcgcctcatatcagaacacccagaactgaaccaatggcgtgatgttacccgctatggcattaatttaatctttgttgcacccgacacccctctcaaagatagtgatgaagtcgtacttattccccccgttagcggtggttgaagagacagggggagatgggaaagtaggggaagcaggggaagaaagggaggttaacccagtccccagtccccagtccccagtccccaatcaccagtcaccagtcaccaatcccgataaaaatagtcgggtatgtttgacgagtattttgcctcgtgttagtatttttttcacagttgacggatatacggggaaagctagtttatgactcagtccatcgcaaacttaaacaaagccaacacttccatattgaaagcactcaagtgtaaagaatgtggtgcagaatacgaactccaagctactcatgtttgtgagttgtgcttcggtccattggaagttaaatatgactatgatgttttgcgtcagtctgtcagtcgagaaactattgaagctggtcctaattcaatttggcgttatcgtcaatttttacccgttgctaccgacaactatatagatgtgggaacagggatgactcccttattgcgttctcatcgtcttgcccgtcgcctgggtctaaataaactttatattaaaaatgatgccgtaaatatgcccaccctcagctttaaggatcgggtggtgtctgtggcactgagcagagctagagaattaggttttacaactgtttcctgtgctagtaccggcaacttggcaaattctaccgctgcgatcgctgcctatgctggtttagattgctgtgtattcattccttctgacttagaagctggtaaggtattaggtagtttaatttacagtcccaccttaatggcagtcaaaggcaactacgatcaagtaaaccgcctttgttcagaagttgccaatacacacggttggggatttgtcaatattaatcttcgtccttattattccgaaggttctaaaacattaggttttgaagttgcagaacaactaggctgggaactaccagatcatatagttgcacctttagcttctggttcattgttcaccaagatttataaaggtttccaagaatttaccgaagttggtttagtcgaaggtaaaaaagttcgctttagtggcgcacaagcagaaggctgttctcccattgctacagctttcaaagaaggaagagactttattcaaccagtaaaaccgaatacaattgctaaatccattgccattggcaacccagcagatggggtgtatgctgtagaaatcgcccaaaaaacaggcggtaatattgaatcagtaaatgatgcagaaattatcgaaggtatcaaactgttagcagaaaccgaaggtatcttcaccgaaaccgcaggtggtacaaccatcgccgtgctgaaaaaattagtagaagctggtaaaattgatccagatgaaactacagttgtgtacatcactggcaacggtttgaaaacccaagaagcggtacaaggttatattggtgaacctttgactattgatgccaaacttgatagttttgaacgggcgttagaaagatcccgcacccttgatcgcctagaatggcaacaagttctggtttagtcaatgtcattggtgaattacaatcaaccactgactttaggggttgaccaaggctaaacccctaccaactctcacttgaaaactaaaaattaatctttagactatggccgtaacagttctagttcccactgcgctgcaaaaattcacaaataaccaagctgtcttagaatgcagtggtagcaacatcgctgaattatttgattctttagagcaagtttgtccaggtattaagtcgcgtttatgcaatgaagaggggaaaccaaatcgcttcttaaacttatacgttaatagcgaggacatccgctttttagatggaacagcaacacctttaaaagatggtgatgaagtgagtattgttcctgctattgcaggtggttaagctactgactgataattttccgccacaaaataactcattattttcctttgtgtactttgcgaactttgcggttaataaatcccaaaaaatctcaacaatacgaagaaaataaagggggagcatcccaaatgtgtaagtttatttttctgaaatctcgcaattcattcaaggcttgatatgattgaaccgcaaagaacgcaaaggacacaaagttaagagattttaagaggtttttgagtgtggctgcgtttattttttcaaaattgggatgctcgcaataaaggtgcgtcagatattaaattctgacacaccctacaagtacaaaaaaaggttaattaatcaaaaaaaaccaagattagttttgcagcaaaatactaagctgtcaataatgcctttaagtcttcagtttttaatcttggtccgtaggttgtaactacttgagaagctgcggtagatgctaattttcctgctgcttcataactcataccgtgggtaataccataaagaaaagctcctgcatacatatcacctgcacccactgtatccacagcatgaacttgaggtgcggaaatttcaattaatttttccccatcaaagactacagaacctttagaaccacgagtaatagcaaatttctggctgagaattttcagtttatctacagctacctgaaaatcttctgtttctgctaaacctaacgcttcactttcgttagcaaaaataaagtctaaaccaggtccgatcatatctaataaaccatctttgaaaaattttaccatgttgtaatcagatagggacatggtggttttaactccagcatttttagcgatatctctagcttgaatagctgctgctttaccagtgggagatgtgactaaataaccttcgatatataaatattctgaatctgcgatcgcctctggaactaattcttgacttgaaaattctcctgttattcccaaaaatgtattcatggtacgatcagcatcaggagtaactaatactaaacatttacctgtaattcctgattgcaaatcagcattttttaagttagtatctacctgacaattgagtaaatcttgaatataaaactctccaaattcatcattagcaactttacaggaataaaaagtttttcctcctagttgactaatagccactattgtgtttgctgctgaacctccacaacttttatgacaatgaagatgtttgagattgtctaacataagattttgactatcttcatctagtagtgtcattacacctttatcaatgtttaacttttctagcaactctggagatacttcatattctatatctaccaaggcattacccacaccataaacatcatatttcttacccatttttagctccttacaaattattctttgttatcttatatcatgtctggttgaacacttattatatctgttgaggctggtaattggtaattggtaattgggttattaacttcctcctgactcctgactcctgctatatgttcatctgtgttgagttagttgttgttgccattgttgataattttcgatattatttaaaactattttctgataggtttcattaattaaatcaatgtttaaaacctgaccaaaattattttttcttgtcacataccaaaattccttacctctgtttgtatagtaagttccggctttaattaatcccggtacaaaagtaccaggggcgcgtaaatctttcagtgtttttggtggtaggtctatggtgacagagataatatgatttaggggtatttgccaaagtttgtgaaagcgaatggctataagttgttctgttaaagtaagttctatttgcaaagagttgtctacaatacttaattccatgattcttccttttgattaccaatcacctcttccccaatcaccaattaccaacgccaagaatatgatatgtaaaaataagaatgactgactatagcacagttagataaaggattgacctgagcaatggcagaagaaaccaatcaaaatcaagcagaaaccgaaaaacccgctgctgctaaacctgcggctaaaaaagaaaaaccccccgcagtggaagataaaccatttgaagagtttatgcagcaacattatttaccagctttacaaaaggcgatcgcagatgaaggagtaccagatgcccagctaaattttgccaagcagaagtatcctattattggctttgactcagcggaagaatgctggcaaattattggttcttggcaaaatggacaaaaacagtttaacgtctatttccccgatgcagacattcaaggtaaaaagggtttttcctgtaacgaaggtaaaaaacccagtaccctagagtcattcttaatagatgagcgcaaaattacccttgatttattggtatctcgcctagtttaccgtttaaacggtcaaaaatggctaggtagaaattaattatcaattgaaaattgacaattgataattggtgttgtatgagtgccttttggtgctacatttcgtggaaatggtaggtaacgactccagtgatggggtcgttgtctattcctatatagccggattttagcatttcttttaggatttacaggataaaaacaggatttttatttttgggttttaattaattggaatttagatagtttcaagatcccagtttataacttacataacgattcaaactgacattttcttatgctgcttctatcgctaattttcgatgaagttcaggagtaatacgaacttgaaatttaccactgtaggttttttctgcaataggttctggaatttattcaccattagcttccatatctaatactatatctttgaccaaattcgtaataccttctaaagccaaattacgattttcatggagataagataagctaggaaattcagcacataatcctacaaattcttgatcttcacttgaccaggtaattttatatgtgtagtggtcgtagttaaccattttccattccctcaattttctcaatggctgctaaaacctgcttgacttgataaaattttgcttttccattcttttcttgaatgttaactcttggatctccaaaccaaggtgttttatagacacaatgacttgttccttgctgtctaggttctccgaaataatgattacaaagttttactaaattaaattagtaaatttgacatctttaggattattttttatttcggctaaaagtttttcaatttgtgctatagaaaaattatagtaccactattgatactatgtcaaggaatattctggaaatcccaattccttcatatttattgataattaactaaaactcaaccaactaaacacttcttttaccgtcaattctaaattaacaccttcaactattggcaactgatcatcaccgtcatataaatcaattttttgcccaggaaacacagctaaaacactttcttcttctgggttcattaaccaacctaattctgtaccattgcgggaacaatgtaataatttagttaatacctttttttgttgttgttctggagaaagtatttctattacccagtcaggatgaatttcaaaacggttgttaattttccctgatgcggttttaggtattctgtcccagcgaaatacagctatatccggtacaatagtatctccaccaaaagtacaacgtagttctgggaaagcataggcaattttttgtgtttcggctaattggttaatagtagtacacaatttaatctgtagaaggctgtgttcaccctgtggcattggtttttgtataatttccccgttgataaattctgatgctggtttagtttctggtaatttcagaaactcatctagagtaatttggagttcttttgttatagtcatagttattaatgaataataatcttcattatatcattaataacagaaatgttgaatgtcgttacaaaagtttacatattcagttatagtagtcctattaagggtgaaaatgtcaacatctcatgatatcttccatccaatgaacataactaatttgttgacacatacaa

SEQ ID NO: 115 - DNA, 11008 bp, Sphaerospermopsis sp. LEGE 00249
  LEGE00249_136
ttgacactctccgggctaaagccgcggagattctacattctacgtcagaatttgctctagcaggttttcgccaaccagaacagagatcccaactcctgtagcgtgactttggggatgccctcccctagcttgcttggcaagatttaaaatattcactgctgcattcacatctctctgcaactcgcagccacaattacatttatgggtacgagttgaaagagattttttgacaatcgcaccacaattactgcatttttgtgatgtgtaatgtggagcaacagcaacaacaacactgttaaacttaacagcaaaatattctagccattggcgaaaagtagaccaagccgcatcattaattgacttagcaagacaatgattttttaccatgttcttaacacttaaattttcgtaggctactaaagcgttagctttgcatacgttacgcgcaactctctttgcgtgttcattccgttgcctacttacttttaaatgtttttgagcatatctttgtcttgctttgcgtcttagattcttacctttttctttggtgtagattcgacgttgagcgtgtttgatggacttctctgcttttcttaaaaagcggggatttggttcatgatgtccattggaatcagagtaaaaatactctaaaccaacatctagaccaatttcaccatcagctattctgggttcttgtttaatttctgtatctacacagaattgaacataaaaaccatcagcacgcttaacaattctaactcgtttaattaacttaattgggtatgtgtgaatatcccatttccccaataatttaagttcaccaataccttttttatcagtaaaggtaatacgtctttttgttgggtgcaatgaccatccagatgttttatattcaactgaacggttatctttttgaaaatgtggataccctttctttccggcaactttctttttacagttgtcgtaaaatctctgaattgcttgccatgctctttcggttgcagattgacaagccattgaatttaattcttctacaaaactaaactcttttcgtagtgctgttgagtagttatttaatgcaattctgttaacttttgcttcttttgggctatccatccaatagcggatagctttgtttctgacaaactgagttgtcctgattgcttcgttaatagcttgtttttgtttttggttgcatttggctttgtactctaacaccagcactacttaatcacctccttgagttttagatattgtctagtatacactatctatatacaccaagcaaaggtaatttccaaaatggctaaattttctccagatgagtacagacatgaaggtaacgcggtttcattacttaactaccactttgtttttatacctaaacgccggaaaaaagttctcactggagcaatagcggagcgacttcagcagattatctgtgatgtttgcaatgagaatagatggcgaattatcgcaatggaaattatgccagaccatgtacatttattcatcaatgccaaacccaccgacaacccatctcagatcatgaacaaaatcaagagaagggcatcttgtttcttgagaaaagaatttcctgagttactgaaacttcctactttgtggactcctagttattttgttagcactgctggtaatatttgtacggaaacagttaaacactatatcgcccaacaaagaaaatagttaaaatcactgaggcgtaaacgccttaactggctttcatcccttgcctaaaggacggttaagtttctccgccacgctccaaaacttaacctcaagggttttcagcctttttccttataaatgagaaacaccgaaccaatgggaccaaaattttccacatacaccttattattataaaacaaccctggagacatacccccatcaaataacattccttccctaattctccctaaacaattatttctcgcaataccttctaaaacatcatcaaactgactaggtaacaactctttattatttgcagaaacttgaatactagaattagctttcacatcattaactaacagaattacataacctttactggtaattgctaccatagaacggttagtagcacctttacaagcaaaatcacccaaagctttgcaaatatctttaaaaacaccctgattgtaaaatctaccattaccacctactacattataatttagtaaattagatcctctttttcctatctgaatagtagcaacacgctgactggggtttcctccagaaatagcaaaagaagaacgtttatttttaaaagcacctgaatattcaacaccacgagaaatatttaaaccttggggtttattcaccgtatctatataatctgcattaatagctgcaataggttttctaccatttaacttggaattttcatcacctaccaattgactaaaaaatttagggatatactctcttctaaaattacccctaccatccttagcatagattttatgatctaaacccacatttactttaaaatctaaatagggggatttaggattaaaaacaattacatgattaatacctctagaataacgttcaccttgattattagtcttgaaaaatccaatactaaaccgagaattattaccaggacaaatagttgatggttttggttgagaattagccacctgatcctgaaaacctaataataagaaactgctactaattaagaggaataagaaagataattttttcatggattggtaattggtaattggtgattggtaatggataggatttacaggatggtttattttatcagaatcaggacaccctttgggaagtcaaaagtcaaaagtcaaaagtcaaaattttttgtctgaatcaggataaccaggattagaggatgtacaggatgttattgtttaattaatggtttgattttctatctttttgtctgaatcaggataaccaggattagaggatgtacaggatgttattgtttaattaatggtttgattttctatctttttgtctgaatcaggataaccaggattataggatgtacaggatgttattgtttaattgatggtttgattttctatctttttgtctgaatcaggataaccaggattagaggatgtacaggatgttattgtttaattaatggtttgattttctatctttttgtctgaatcaggataaccaggattagaggatgtacaggatgtaatttttattttaagtttctagtttacgaaaagatgataaatttagattaaataatgataagctgttacacagctaaattgtataatcctaatgttctgaactcttgtttaacaggcaagatgcctgttccacttatacaaattaaatgcacaacagcttataatatctttagattctgatgcaaacagaaaagtaatcaataacaatcctgaaaatccttaaatcctggacatcctgattcagacaaattcagaaatttaaacaataacaatcctgaaaatccttaaatcctggacatcctgattcagacaaattcagaaatttaaacaataacaatcctgaaaatccttaaatcctggacattatctcgacttcgctcgataaccacctgattcagacaaattcagaaatttaaacaatcacaatcctgaaaatccttaaatcctggacattatctcgacttcgctcgataaccacctgattcagacaaattcagaaatttaaacaataacaatcctgaaaatccttaaatcctggacattatctcgacttcgctcgataaccacctgattcagacaaataaaatctataaaatcaaaccatcaattaaacaatcacaatcctgaaaatccttaaatcctggacattatctcgacttcgctcgataaccacctgattcagacaaattcattaacttatattaagttacattaacaaaataataaaaaaattaatacaacataacttagtcaagactttacaactatacgtaagtgtagttattatattgattagattaaatagattcagatcccgtacttcttaaagaaatccgggatctataaagattacccattaccaaataaatatgactattcaaaaaatattaaacgaatttaaacaaacttccacctctacccgtgatttaggtgataaatttgaacgcttaatgttaaattatctcaaaactgaccccttttataaagatcattttagccaagtttggttatggatggaatttcctaaacggggaaatatgccagatacaggtattgacttagtagcagtggaaaaggatactggggattattgggcgatacaatgtaaatgttatgatttagatcagaccttagaaaaatcagatatagattcatttttcaccgcttccgggacaaatttatttaaaaagcggatgattatttctactacttctaaatggagtaaacacgcggaagcagcattagaaaatcaacaaattcccgttattcgtgctactatttatgatttagaaaatagtcccattgattggaataaatacagtgttcaacaaccagaaaaactagaacttaaacctaaaaaaagcattcgtccccatcaacaaaccgcattagaaaaagtcctcactgggtttaaaaccgcagatagaggtaaattaatcatggcctgcggtactggtaaaacctttactgcgttgaaaattgcggaaaattttcctagagataataatttagataatcacttaattctgtttttagttccttctatttctttactttcccaaactttaagagaatggactgctgaaagcgagattaattttcatagtatcgcagtttgttctgatgtcaatgtgggtaaaaataagaaaaagggttcgacttcgctcaccaaccatgatgttgcagatattacagttaatgatttagcttttcctcccacaaccaacgcccaagatattattaaatcctatcagactcttgcagataaaaaagaattaactgttattttctccacctatcaatctattcaagcaatatcggaagcgcaaaaaattggtttaccagaatttgatttaatcatctgtgatgaagcacatagaaccacaggagtaactattgcaggaacagatgaatcttattttgtgaaagtgcataatcaagattttattaaagccaaaaaacggctttacatgacagcaactcccaaaatttacagcgatgataccaaagttcaagctaaagaaaatcaggcttttttatgttcaatggatgatgtacatatctacggtaaagaatttcatcgtttaggttttggtgaagctgttagcactggtttattaactgattataaagtcatggtgttagcagttgatgaaaaatttgtgggtgcaacttttcaacaacagttagcagatgcaaataacgaattaaatttagatgatgcagtgaaaattgtcggttgttggaatggtttatctaaacgtttactcaaagatgcagaaacagaagatatagaagataataaccccatgaaacgtgcggtggctttttctcgtagtattaaagattcacaaaaaattgtgagattatttggggatattatcaaccaatatcaacaattaaaccccgatgatgaaacatttttacaatgtgaattagaccatgttgatggtacacaaaacgctttacaaagaactgaaaaattagaatggttgaaagctgaaccccccctaaccccccctacaagggggggaaatgaaccccgtcaggggggtaatatctgtcgtattctctctaatgcgcggtgtttatccgaaggggtggatgttcctgcgttggatgctgtcatgttcctcactcctcgtaactcggtggtggatgtggtgcagtccgttgggagagtgatgagaaaagcagaggggaaaaaatacggttatattattttacctgtgggtattcctgcggatatgtcgcctgatgtcgctttaaaggataatgaaaaatataaggtaatttggcaagtattacaggcattacgcgcccatgatgacagatttaatgatactgttaataaaattgacctcaataaacgccgtcctaataaaattagtgtggttggggttggaggtaggcaaaaaaatgatagttctacatctacaaatacgggaagttcctatcaacaattagaattaaatttccccgttgaagaatggcgagatgcgatttatgcgaaaatagttactaaatgtggtaatcgtcgttattgggaagattgggctaaagatgtagcgaaaattgctgaaagtcacacttccagaattaaagcattattagaaagttctgaatcagcagccaaaacagcttttaatgagtttatcacagggttacatcaaaatattaatcccaatgtcaccgcagaagaagcaattgaaatgttatctcaacatttaattactaaacctgtgtttgatgctttgtttgaagggtatgagtttactaaatttaaccccgtttctcaaaccatgcaaagaatgttagatgtgttagaaggtcaatctttgcaaaaggatgtgaagactttagaaaagttttatcaaagtgtgcgagaacgcgcaagtggtattgataatgcggaaggtaaacagaggattattattgaattatatgataaatttttccgtgctgcttttcctaagttagtggaaagattggggattgtttatactcccgtggaagtggtagattttattattaaaagtgctgattttgccttaaaacaagagtttggtgtgggtttatctgatgagggtgtacatattttagatccctttactggtacgggtacttttatggtgcggttgttgcaaagtgggttaataaaacgggaagatttacaacggaaatttagtcatgagttgcattgtaatgagattgttttgttagcttattatattgctgcgattaatattgaggaaagttatcatttcttagctggtggtgaatatcggccttttaatgggattgttttaactgatacttttcaaatgtttgaaaatgacggttatttgttagaaaagattttcccggaaaataatcaacgggtgattaatcaaaagcaaaatgatattactgtgattattggtaatcctccttattctgctggacaaactagcgaaaatgatgggaataaaaatcttaaatatgatcagttagatgacagaattagaaacacctatgctaaatattctactgctactaataaaaacagtctttatgattcttatattcgcggttttagatggggaagtgatagaatcaaagataaaggtatagtgtgttttgtgagtaatggttcattcattgataataatgcaatggatggttttagaaaatgtttagttgatgaatttacgagtatttattgttttaatttacgcggtaatcaaagaacttctggagaacaatcaagaaaagaaggaggtaaaatttttggttcaggtagtcgcgctactattgctgttattttattaatcaaaaatcctgatcaaaaacaggagtgtaagttattttatcacgatattggtgattatttaagtcaaaaagaaaaattagatattattaaagtttttggtgatgtttctactatccaatggtcagaaatcacccctaatgaaaattatgattggattaatcaacgtaatgatgattttgaaagttttatttctttaggtgataagaaagacgcaaattctaaaactatttttgatttatattcaaggggtgttttaacaagccgtgatgcttggtgttttaatttttcacgtcaattattaattaataatatgactaaaatgattaatttttataatgaacaagttgaagaatttaaaaaatatttaaaaggtaaaattttatcaaatactgaacaaaggaaaaaacaagtagaatcttttatagatgcagacactacaaaaataagctggtcaagagaattaaaagatgattgtggaaagttaaaaatacatttatttaatgagaatgaagttacaaaagccatgtatcgtccttattgtaagcaatggatatattttaatagatatttgaataactgtgtttatcaaatgcctaagattttccctaatcataatttggaaaatttattaatttgtgttatgggtagaggagaagataaagaattttctgtgttgatatctaatgtattaatagagtataaattaatatacaatggggataatttccccttatatacctacgaaaaacaaagcgaactaggaacattatttgcaacagcaaccacagaagaatataccaaaaaagaaaacatccccgatcgcatattaaaagacttccagaaaaaatatcaagacaaaaacatcaccaaaatagacatattttattacatatatggagtcctccactccccagaatataaacaaagatttgcagcagacctcaaaaaaatgttaccccgcatcccctacacgggagacttttggacattcagtaaagcaggtagagaattagcagattatcatttaaactatgaaaccatagaaccttatgaaatcaaagaattttcaccagaaatatatttagatcctcaagattaccgtgtagaaaaaatggtatttggaaagaacaaaaacggaatagataaaaccaccatcatctataacagtaaaatcaccctaacacaaatccccctagaaacctacgaatatatagtaaatggaaaatcagcattagaatgggtaatggagagatataaaatcaccaaagataaagatagtggaatagtcaacgatcctaaccactggtcagaagatccgcgatatatagtagatttagtcaagaggatagttagggttagtttagaaacagtgagaatagtgaaaagtttaccagcattgaatgaatggtaatatttgtcagaatcaggataaccaggattagaggatgtacaggatgtaatttttaaacttctaattttcctttgcatctttgcgtctttgcgtctttgcgtgagatattcttcaatctttaaatcctgataccaacagaaaattaaaaaatcacaatcctgaaaatcctgaaatcctgaaaatcctgattctgacaaataatgatataataaaaaatatttaactcaggagttaaaaaaaatgacatttaaagaacaactggtagcagaaatagaaaccatgacagaagaacaaatagcagaattgttaataatggttaaaaatatgaaaaccaaaccagaaattaaacggcattttccagttgtgaatatggtaggtaaagctaaaacattaggtgatattgttagtcctattgtagatgaaaaggattgggaatgtctgaaataattgtacttaatactcatatttaaatgaggaattattatgaatattgtaggttgggtataatgaaatgaaacccagcaaaatcatcattatcaccaatcaggattaaaggatgtaatttaaaatttaagatttaaaatttaaaatttaaaatttaaaattgtcagaatcaggataaccaggattaaaggatgtacaggatgtgatttgtaaattttttgttgacgaaaagatgataaatatagattaaataatgatataatatctttaaattgtgataccaacagaaaattaaacaatcacaatcctgttaatccttaaatcctggacatcctgattctgaccaaaaatgatcatcatgaatagagagaatttaattaatttcctcaaagaaaatttaactaacatcaaaagttatggtgtcacatccttagctttatttggttcttatgcaagagatgaagctaaaactaccagtgatctggatttattagtagaatttcaaggacaagttacctttgatcaatatatggatttaaaatttttcctagaagataacttaggtttatccgttgatttagtaactaaaaaaatgttaaaacctcaagtaatcagttcagtagaaaaggatgtaatttatgtcgcgtagtttaaaactctattgtgatgatattgtcatcagttgtgataaaattctgcgttaagtcgctcagtacaagtcgctcagtacaagtcgcgatagttgagcgtagtcgaaactcgataaccacctgattctgacaaagaatgatataataaagaatattaaatgtgcttcaggagttaaaaacatgacattgaaagaagaactattagcagaaatagaaacaatgacagaaacgcaaatagcagaatttatcgtaatgcttaaaaacatgaaaaataaaaatccaaactttgaagaaaatcaaattaaaaaattaactattggtgaatgtatagcaaaatttcgagaagaattaatagaagaaaaaatagaaattaaccctgatgaaatttggcataatattcgtgattatcatccaggtagagaggtaatttggtgattcgctttttattagatactaatattatatctgaacctttaaggatagaacccaatcaaacagttttacaaaacatggtaaaatatgaattagaaattgctatggcatcaataacatggcatgaactattatttggttgctatcgtttaccaccttctaaaaagaaaaataaaattactcactatttacaccaggtaattaggggttgctgagaaagtctttccgtgagggcataggagtcaggagtcaggagtcgtaggggcgaagcattcggacgacaaattatcaattttatgaaaaggctattttccgaatgcttcgcccgtacaggagtcaggaggagatgtgaaaatttctttgccgtctcttgaaatcccaaaaaatgcacactttttccggtatacccttcaaaacccttggactaatttctgtgtttatcagcctctaacctttgatatatcaaggttttaggtttattcagcaaaccctaaatagggtttgctgaaaaagtctcttcgttaaggcagggaatagggaataggcaaga

SEQ ID NO: 116 - DNA, 10446 bp, Sphaerospermopsis sp. LEGE 00249
  LEGE00249_139
ggtgactggtgactggtgactggtgactggtgactggtgactggtgactggtgactggtgactggtgactggtgactggtgactgggtaatcaattttatgttttttaatcaactattaagctgttacacagctaaattgtataatcctaatattctgaactcttgtttaacaggcaagatgcctgttccacttatacaaattaaatgcacaacagcttaccaattaccaattactaattaccaattaccaattaccaattcccaattcccaattcccaattcccaattcccaattcccaattcccaattacctaattaacttaaactttcaggatcaacacccaaactcttgagaatttctgctaatttccgggctttttcttcagcttccaaacgttgtctttcagattctaaacgttgtctttccgcttctaaaagtttttcttccgattcctgaatccgttcttctggggtaaaaaatctttttccctgttcatcaaaccaatataaccattctctagttataccttgataagttcccctttctctgccaattcctaaacctatttctggcaaccaaacgggatttcctgagagtagtacatattctccatcaactaatttataaacttctaaaggttcttttctcttgcggaggggattataaaccacataatataaaatcccaaattcatgggcataaaaatcctttttattgctatattctccccgataggtttgggaaacaacttctaaaaccaaaatcggtaatttattttcttcccacaatacataactaggacgtaaaccttcatcaataaatctatgtaccccaatacttaaaaacccatctgggacaattgcaggttgataagggtcatgatatattcccatatctacaccaaaaaaccaatcccatctttgagaccacaataaagcaagaatgctttctagcaaaccaggaatgagatgctgtaattgattatccactggtgtgtcgtcagagtcgggtaattcttctgaagatggtaaacaatgcaatgggttgtaattgagcatgattgattttaccaattctttttttattatatatgatttgtttcattaaggtttataagctgttgtgcagctagattgtataatagggaattaggtaactaagctatcgcttctgaattatgccagcaaaaaaccatctatctcaagaacagagagaaaagactgggaattaattcccaggcggttcaggaagctaatcgagtatgttgtaagatgtaaggattgaaatctttacccataaaccttacttccgaccacccaaccatttagccgccgcaataccgataattcctgccacaataggattactcaaaaacttaataattcctggttgttctgctaacacatcacggaaaacatcaggatgattatgataagtaaaagatgcaagcgtactcacatcatcagcagtcatgcggttagggtgatgggtagaaagatttaactgctgttctaaccttttctcatccagtcctcgttcctttaattgtttgaaaaatgctcttgcaacatcatctctttcattcggtttaatttgagaaatggccttttgtaattccggatccatttgactgggagggatacgttctggatgcaaagattgattaaataaatgtcttctttgatccttggttgtgcgttgagcaaaatcatcaaaggtttcgtactcatccgttgtcatggcgttgagattatccaaagattctacatttccctgcgccaaatcttgtaaaatattacgtctatattcttcactacttctcactgtaattatctcctatattttagggttgttaatttcgtaatatttgaaaaacaatcctcctagctatacctaatttgattagtctgagcaacataatcagcagtcaaaattagttttttatcaggactatataccaaaaccttcacatcctgattaggaaaattctttctaaaaccttgtaccaaagaactcgctaaaggacgcacttcattaggactaacttgaggagaaataaccacacctagcttattattatctcgcacataagcatcagtaattaaccccttagaagtttgtacaacccaattaccaaaattttgccctgcgggagtattaccacgttctaattcagcataagtcacatctcttcccaccgctggagtcgttgagcgatcaacttctgcaactcttcccccaccacaagcagaggttaaagttaatattaaaatcaagacaaaagcagtcaaaattttacgactctcctgaattagattcataatttttctcctcagacaaataaaaatttaagtcctatttttaagtcctattttcaggaaggttcgtagttagggctttagccctaaaaaacatgggaatttagcgataaatcgcccactacgaacctatagggataaatcgcaactacgaactattaatcaagctttttcttgacgttatctttgacatcttctacagcgtgacgtacttcgctttccgcttgtttagctttaccttctattttatcttctggatctccagtaacgtttcctaatgcttcttgtgctttaccttcaatattttttgctgtagcttttgctctttcttctaaagtcatttgttgtcctatttgtttgcaattactattccacactagcggtaatataggctgattacttccaccatcaggtatacagttgatgttaaatatctatacaaaaaggaataaataagcaaatattctgattcttgattttagcatttttcccataaaaaatcccagtttatgaataagactgggaaaaattgaaaatgacctctctcttcaaggaagaggattgaaaaagcggattttttttggttttttcccctggaaaggggagcttttaaaccgtatggctaacgccacgctacgctatcggctgacgctcacggcggaagccttgaatgaaacaattatcaattgtcaattgtcaattatcaattgataaaagtatgaggataattttggtaaattagtctagaaaacccatcaaaatatcagagtcatcaattgtatttgatgctactggacgattaccaaaaattgaatagttttcggaaactaccaacgcactagaaccgatgggacgatttccagataagttgatactgtttacaacgctgaaggtattggcaccaatgggacgaatacccattgcattgtatgtgtcaactacttgtaagctacttgtactgataggacgtaaaccagcaattgatactgttcctgcaacttgtaacccactgctaccaataggacgctctccagcgactacaattgttccttgagaagcttgttctgtattaccttggttattttcttccacttttttatctcctttgctgctaagatgctttgtaaactaacgcatctagctggttacgtgaattttacaataattaaggaaaggtattttttcctaatatatgtagagtttaactctaaaaaacaacccatatatataagtttcttcaaaagtgatacataagtaaacttaaactattaatttatgtaaacaagtattgctaaatcttgattgctttcagatccccgacttcttcaggactgacgcagcgtagaacagaagtaggggtaattcatgaattacccctacgcaagaaatggtagaccatataggatgtcgctactataggaaagggtatattgaacgaaacagtgatcatggaatttagtctgcaagctccttttactcctacaggtgatcaaccacaggcgatcgctcaacttttgaaaaccatccaagcgagtaatcgttatcaaactttactcggtgcgacgggaacgggtaagacgttttctatcgccgcagttattgaaaaagttggtaaacctaccctagttctggcacataataaaaccctagcagcccagttatgtaacgagttacgggaatttttcccccataacgcagtcgagtattttgttagctattacgactattaccaaccagaagcttatattcccgtcactgatacctacatcgaaaaaaccgcagcgatcaatgatgaaatagatatgctgcgacattctgcaactcgttctctgtttgaaaggcgtgatgtaattgttgttgcttccattagttgtatttacggtttagggatgcccgcagaatacctcaaagccgcaattaaactagaaataggtatggaagttgaccaaaggcaagttttaagagatttaacatctgtgcaatatagccgcaatgatgtagaaatgggaagaggtaaatttcgcgttcgtggtgatgttttagaaattgggccagcttacgaagatagaataattagaattgaatttttcggcgatgaaattgacgcaatacgttatattgatcctatcactggagaaattctcagcagtttagaaaaagtcaatatttatcctgcgcgtcactttgtcaccccagaagaacgtttagaaattgcttgtgctgatatcgctgcggaattaaaatcacagaaattaaaattagaagaattaggaaaattagtagaagcacaaagaatagatcaacggactcgttatgatcttgaaatgttaagagaagtgggatattgtaacggtgtagaaaattattctcgtcatttagcagggagacaagcgggagaaccaccagaatgtttaattgattattttcccaaagattggttattagtaattgatgaatctcacgttacattaccacaaattcgcggaatgtacaacggtgatcaagcacggaaaaaagttttaattgatcacggttttcgtcttcctagtgctgctgataaccgtcctttaaaagctgaggaattttggcaaaaggttaatcaatgtattttcgtttctgcaactcctggaagttgggaaattgaagtttctgaagataagattgtagaacaagtaattagacctactggagtagttgatccagaaatatttgttcgtcccacggaaggtcaagttgatgatttattaggagaaattaaggatagagttgataaaaaagaacgggttttaattactacgttaactaaaagaatggcggaagatttaacagaatatttggaagagagaggaataaaagttagatatttacattctgagattaattctattcaaagaattgaaattttacaagatttaagaaatgggaagtttgatgttttggtaggggtgaatttattgcgggaaggtttggacttaccagaggtttctttggtggctattatggatgcagataaggaaggtttcttgcgtgcggaacgttcattaattcaaactattggccgtgctgcgcgtcatatcaacggtaaggcaattatgtatgctgataatttaacggatagtatgattaaagcgattgaagaaactgatagaagaagaggtatccaaatggcttataataaaatgcacgggattacaccgcaaccgattgttaagaagtcgagtaatgcaattttatcatttttagatgtttcacggcggttgaatgcgagtgatttaaaagtggttgatgaacatattgatgaatttgctttggaggatattcctgagttaattactgtgttggaaaaacagatgaaagaagcagcgaaaaagatggaatttgaagaagctgcaaaattgcgcgatcgcattaagcatttaagggataaaatgttgggtaggtaattatggaatttttgtatagaactaggaatttagccaataaattatttaaattgtttacttcataaattcctttttttcttgatcagaaatgtaaccctgtttaacagctttattaaccaaatcccgtaaaaatcgtctaaatccgtataaaaattgaactttctctaaggtaaatttatgtgtttcatgagaataaccatactcttgccaaatacaatttattttccaagtatctaatgacttaaaactaattgcgaaaccactttcaggaaaatccaattcaatgttttgacctattaaaagctgataaattttttctggcaactcttctagtaccaggattatatcaggatctaagaatatttcctttctcttttttccaagtttgattaaaactttttgattatttctaaaacaaaaaagtcttaaccccatttctaaatgagaaagttcacctttaggatcttcagggggtagacaatattctacattgacagattcttctaatttcagagaaaatgtattcattcttacctcttgcataagatttagcttagtctaaatgtatctaaaacaggatatccacaattgaatgttccatcattttttcttttaataaatacacgagttacattttcaataatagttccgttagtttgataaactctgccaataggacgtttaaaatccaaaatatatctacctggatatttaggtataatttgctccgcctctacccagtcttcttcatttaaccattgttcttgaggattttgtgtactggctattcttccccttaattgctctattctaactctaggtccatgatgtcgctcaatattatcataggcttttgttgatctaggattattccattgtggttcttctcccttacctctccacacaaacccacttcctacttctacattaggatttgttatctcctgttgtataacttccgctgatgggtaattttgctgaaaatttggataattattgtcactcaaaacgcccaattcccctaattctaattgtagtatttgatcaaaaccattttctcatgtttttatgaacttgtgacaaataccacatataatcatcaattttaaacttatccgcagctttgacaatatactcttttgctaactcttcattcccctcagcttcataatacaaacctaaataaagatgactgtaaaaattaccttttaaaccttctgatttacccacaatcaaaacatcatcagttgtacaattacccgcaaataaatcatagacacaacgcataattttccggggatcatttttcacaggtaataaagaatttctagcttcttccacacccgataacctagcaatacaaagatatctccacacagtttcttctacatcctgtgcattgacagttaaatcaatttcaaattgttttgcaccttcggcgaatctttccgcataataataagataaaccccgttgccaaagatagggaataattcgatcatctaatttttctgcggtatcaaaatctgtaattgattcctcaattttccccaattgaaaataaaccattccccgacgaatgtacacattagggttatttggttgtttaataattgttgcgttccagcgttgcaattgactttctaaagagttgataaaaaacatagattttgtgatgaaaaatgatcataaaatgactttttatctttgtagggttttagtagtgctaaacccatactcctaaattattactaattccattgagcagaacatttttccctatcttcctattccgtcttccctagcaaaaaaatcggggtatttccagaaaccacagaaatacccccatctgaaaaactgattaaattgattaactactatgcaaaagcagcagttctcacatcattattagccagaatttcttgcaattcatcagcgtcaacggtttctttatcaatcaacatttgggcaatttgatccaaaatgtgacggttacttactaaaacttccttagcccgtgcgtaagcaacatcaactaatttacgcacttcttcatcaatggcagcggcggtttcttcggagaaatcacgctcagacatgatatctctgcctaagaacatattaccttgttgacgacccaaggcaactggacccaagcgatcgctcatgccaaaacgagtaatcatttgtctggcaactcgcgctacttgttgcaagtcgttggaagcaccagtagttacttcctcttcaccaaagataatttcttcagctaagcgaccacctaaagccacggccatctgattttccagatatgcacggctatataaacctgtatccatgcggtcttcgctaggagtaaaccaagtcaaaccaccagcacgaccacggggaataatgctaattttctgtacagggtcatagtcaggcattaatgcaccaactaaagcatggccagcttcgtgataagcaaccaaggttttgcgcttttcgctcattactcggtctttcttttctggacctgctaacacccggtcaatagcatcgttaatttcatccatcgaaatttcggttaaattccgacgtgctgctaaaattgcggcttcgtttaacaggttagataaatctgcaccggtgaaaccaggagtccgacgggcgattttatccaagtccacatctttagataaggttttaccccgtgcgtgaactttgagaatttcgctgcggccaccgtagtcgggacggtctaccacaacttgacggtcaaaacgaccaggacgcaataaagcagcgtcgagaacgtcaggacggttggtggctgcaatgatgataatgccggtgttaccttcaaaaccatccatttcggtgagtaactggttgagggtttgttcccgttcatcgttaccaccacctaaacctgcaccccgttgacgacctactgcgtcaatttcatcaatgaagacgatacaaggagcgttggtttttgcttgttcaaataaatcgcggacgcgggaagcacccacacccacgaacatttccacaaattcagaaccggaaatactgaagaaagggacacctgcttctccagctacagcacgtgcgaggagggttttaccagttcctggaggtccgactaataatacacctttaggaatttttgcaccaacagcggtaaagcgatcggcatttttcaaaaagtctacaacttcgtttaattccagtttagcttggtcaatacctgctacatcgccaaaggtgacttgggtttggggttccatttgtaccctagctttggacttaccaaagttcatcgcttggctaccaggacctgtttgggcgcgacggagtaagaaaaataaaccaaccaacagcaatacagggaaaaataagctgctcagtgctttaaaccaaaatccttcgtcggtttggggtaatacggcaatatcaacacctttatctctcagagtattgattaaatctggatcgctaactaaggtgacacgctttttattggggtcgtatttaggtgtaacaattgctgtagaacgatctgaactgagactgactctttctactttgccttgatcaacttcttgaataaattgactatagcgccatgtttctacttgggggggttggttgtcaaaaaacgcagtccctaaagcaattactacaataaacagcagcgcatatagccccgcatttctccatcttttattcactgaggtctatcctcctgtattttttgggcgttagtgtaaggtctctaaaataagagagggctttatgagaattatgttaacttatcttaagatataccaaaatggcgttcctgtcatggtagaaataatcctttaagttctaaaaagcaaggatgcttaggattatattctaacgatccggtgggctgatgtacggtatgaatgggaattatctcgacaacgctgttagtgtaggcgatcgctgcaaattctttgactagctgtggtgtccaaggtgcttgctggatggtgatttgacggttttgtaaatgttggataatgtgcgatcgctctatccctggcaatattcccacttctaatggtggtgtccaccaactgccatctttccaaccccaaagattacctgtactggtttctaaccaattgccctcattatctattaaaatcgcttcttcggcgtttacggcttgaccattatttttcgctaaccaaggactcaaataattgcctgttttatggttggggagagaacgggcaaattctggttttgcaagtccagcaattataccattattttgtttttctgtcaagtttgctggtaataatctacctgtgatccattctctcccatcgggaaaaatagtaattctgatcacgggaaaatgctgtaaaagcatttctgcaccttgacgcacaaaattccaatttggttctggccagttgaaagtttgtaaagttaattgcaagcgtgaacaatgagctttccagttagttaaactctgatcaagggaatgatcataaactcttaaagttgtaaaaactgtagctccaaaaagcaaacctggatcattaatatttaattccagagtttgcgattctattaatttaccacaataccaatacatgactggggactggggactggggactggggactggtgactggggactggggactggggac

SEQ ID NO: 117 - DNA, 10429 bp, Sphaerospermopsis sp. LEGE 00249
  LEGE00249_140
actggtgactggggactggtgactggggactggtgactggtgactggtgactggggactggtgactggggaagaaaattttagattttagattttagattagattttagattggagatcacaaaaacaatccaaaatccaaaatccaaaatccaaaatccaaaatccaaaatccaaaatccaaaatccaaaatccaaaatccaaaatccaaaatccaaaatccaaaatccaaaatccaaaatccaaaatccaaaataaaaaacttctgcctcctgcctcctaactctgatgatgttaaaagtttcaaaagttaaactgggaaattgtcagaaattaggtattctattgctgaaagtcagctatgtgatgatgaacccatgaacaagaaggttgaaattttacccgatctcccagctttggtagcacgggcgagggatttgattctgtccaaattggccactgccattcaagaacggggacaatttactattgctttatctggtggtagcacacctaagcctttgtatgaagctatagcctcttcaaacctgccttgggataaaattcatgtgttctggggagatgaacgttatgtaccaccagatcaccccgatagcaatgaacttatggcgcgtcgtgcatggttagatcgggttgctatccccgccgctaatattcacgccatacccactttatcagctaatccagcggtagatgcagctaagtatgaacagcatctgcaagaatttttccatgcagcaccgggaaactttcccccattggatgtagttttactgggaatgggtgatgatgcccacactgcatctttgtttcctcatacagaagctcttaatgtacgcgatcgcttgattactgtaggtaacaaagacggtaatcctcgcatcacttttacctacccattcatcaacgctgcacggagtgtaatttttttggctgctggtgctaataaaagacctgctttagctcaagtcttcgcacctaccgctgatgattttacttatccatctcgcttgattaaacctcaaggagaattgctatggctgctagatgaagcagcaggtttagaactcaaaccctaaattagtgaacagggaacagggaataggaaacatcaattgccttttgccttttgccttttgctttgtgccactgataactgataactacttgctagtaatatattttacaactaacttgattaaggcttaaatccatgatcgtctgcccaaattgcaatcatcccaatccagacggcgctgttcagtgtgaagcttgttatacgccgttaccagcgactacaaactgtcccagttgtggggcaactgtacaagctgatgctgctttttgcggtcagtgtggctataacctacactccgctcctgttgtagcagaaccaactgtagtaagtgcaaccatcgatcctaatattcctgtggaagtaccacctttggttactcctgaccctatgttagaacttttacaagctaatcctttaggattcgatacttatactcatcctcctgttgcttctactctaccaccaacagtcgtggcagcagttccacaaccagcaccagcaccagcacccgcaccagttccacctccagccgcagtagccccacccgtacccacaccagcacccgcaccagttccacctccagcaccagttccagaagcggtagttccaccagcacctgtgccagcacctgtaccagcacctgtaccagcacctgtaccagttgtagttccagttccagttccagttccagaagcggtagttccaccagcaccagtacccgaaccacaaccagaagcaccagcacccgcacccgcagtatctaaaactcaattacaacaagtggtggcgcggctattccatgtccaaagtaaccaagaaattgaattactgcaaaatgtgtctgtaattcatattggtaaacccaatgatcgcattcccccagatattgatgtagcaggatttcctaattcagaaattgtctcacggattcatgcagatattcgtgttgagggagatgcacattatatagaagatgtgggtagttctaacggcacttatattaataatttgccgttattaccaggaaatagacaccgcttacgtccaggcgatcgcatcagtttgggtaagggagatttggtaactttcttatttcaactctcttagagaataattcgtaattgataattcgtaattcgtaattaataattagtaattagtaattagtaattataaattacgagttacggattattagtaggaatattacataatgagagaaccaaaaaatttttcatctttgctcactcaagaagcacccccagaagttgaacgtatggggttaagttggcttgtaggagcagcgatcgccactgctgttttgtggcaattcccagcaggtgattatattttatacccatttaccatcttggcaacttggtttcatgaaatgggacatggtttgatggctctgatcttggggggaaattttcataaattacagatttttaataatggttctggtgtggctacttattctatgcgctctactttggctccccttggtcctgctttggttgcggccgcaggtccgatgggtccacctattgccggtgcagcattaattcttgcttcccgcagttttaaagccgcttccctcagtttgaaaatattaggggggtttttgttattttctgccttggtttgggtgcgttctttgtttgggttgatagcagtacccttactaggtttaattattttggcagtagctttgcaaactccccgctgggtacagggttttgctattcagtttttgggtgtgcaagcttgtgtgagtacctaccatcaattaaattatctatttagttatagtgcaggatctttagggctttccgatacagcacaaatgcaaagatatttactgttaccttattggttttggggtgctttgatggctgtggcttctgtggtgattttagtgcaaagtctgcgagttgcctttcagttgccatctccaaaatagaaaaatagaatttagtaatttatcataagttgtaggggtaattcatgaattacccctacgcaagaataaggtttgcagtcacatcttgcgtaagtcctggaataaagaagcaatcaaagatcatcaagatttagggatttacaaaattgccttttttctcctcttgagtgaaaacaaaaatgtctgtattccttccctgttccttattcccccaaattgagaaaaaactcacaacctaaattttctaaagttggtacaattaaagcccgatctaaaaattcattccgccattcacaggaagtttcggcaatcagtaaacagccatgacaagcagcaccatgtaaaaatctttcttcttgcaggttatctggttgatgttgagaacatacaggatcattagaacataatttacctgtttctaaggcaatttttaaatggtattcaatgttattacctacctctactaaaccccctaatgtcccttcagaaccaggcgaacctgtatataaaaggatgccatatcctgtgtctggattagcataaattctttctctgatggcactggcagcataaccgcattctaaggaaacggcggtaattaatagatgtgataaggaatgcagcattatatagggtaagccaggaaatttaacttgatcttcggagatatttttactgagacaccattgttttaaaccgcttgctaattttctccctctggcttttactacttctttttcttgccattcttcaattacttgtttatgaaacccaataaacacaccttcgcctttattttcaatggctggtatccatttaggttcaaaatctaatgctgcacgctgtacattaatggttaagtttttatctatttctccttcaatatctgggagagaagcttcaaaccgagtaaaccctatttgggcaataacttctcttaacctatggactaatactactctttctatataaggtaataattcactgggaaaatgatctaatttgcggttagttgcataaaaatcatcatgctctttacctgtagtttcttcacaatttaataaagcttctaattctacttgtttaatggttttactttcactgctttgtttattattacgacgttgaatttctgcccaaactgtttctgcaccaaatttcactaagtcggcaaatttcggtttttttagttctttaattaaatcatcaatatcttcggcgtattgtaggtcttcttcatagtaccgatctacggcttgtttgagttgttcatcattatctgggatggaaatgacgcttaaagtctgggcaaaataggcattactggcggatctgactaatagccggttgtattctcgctccttagttttaactatattgcctgttttatctattacacaactgtaacaatcattttgtttaccttgataacccaaccaagggcgatcgccttgacatggtcctaaaactctggacttgggcagtttggcttgagacaggggacgacgcgcacctttacaaacttcgcaccggacaaagatttcttcaaagtcgttaccagaaccaccttcatctaaccatagttgatgtttgcatttggtattaaaatcattgtgggcgaaggcgtaccagttaatatcgctgatgtgtccattggcacaaccttgaacaaagcggataggaacggcgttaactgacttaccatcaaattttaagcctgattgaacttctcgccaagtgactaggggacgggtacggtagtctttgccgtgaaagcggactgttttttctacttgggcgacaaaccaggtggggaaaataaacacaccaacattagcatctggggcataggagtcagggttatccctgggaggactgtataaattaacgggttcttgcagttcgagaatttcctgaactttattttttaagcggtcttcgcggatgtattgtttttcacctttccagaaggataaaccgccgataataacggagtgttctggtaagtcaaccattgaacctggtccgtaggtgttgaggagttgactttggcgtatttctgctaggggggtgagtcgttttttgtgtttgggcataggttggtgactggggactggggactggtgactggggactggggacacttcgacaagctcagtgcatcgctggggactggggactggggactggtgactggggactggtgactggggacacttcgacaagctcagtgcatcgctggggactggtgactggggacacttcgacaagctcagtgcatcgctggggactggggactgggtaattcattttatttttcccaatcaccaattactaatcaccgttcaaccattccattttattaccgtattcttcttgaccttgtttactatttttgatgaaacgacaataaccattcatatttttttcaattttctctctcagttcattaacccaatttaattgttcctttgtacaataaccaagactttctgcaatgataaaaatactggcagtttctgttaatgaaccacgagcaatatataaaaaacgtaagcggtcaagatagtgataacgtccatagctttcagctatatttagaagaatactacatgaagatcggcgcaattgatcactgaggttgtagcgttcatggtttggtaaactatctgctaaacgatatgctgctttaagtaacttcaaactatcttgataaaaatctaaagattcaaagcttttattgtccataaacaatatttggcgattggtgatcaggaataatactacccattacccattattacttactccccagtccccagtcaccagtccccagcgatgcactgagcttgtcgaagtgtccccagtccccagtcaccagcgatgcactgagcttgtcgaagtgtccccagtccccagcgatgcactgagcttgtcgaagtgtccccagtccccagtcaccagtcaccagtcaccagtcacctccacacctcctggatcgcaaattcttaatttgactactggttcaacatcccttaaactgcgctgggctttgaatttctgtcgttcttgggtttgtttctcggtgtagggatcgtagggatctaaaagcaaggggtaaaaagtttctcgttctttctgatattgcaagcgttgatcttgaatgactattttttcccaggtatccaaaaggttgctgactgctttctctatatcttgcacaaagttagcgtctgctgtgggactatgcatggctgcacgttgggcgatcgcctgcactactatttcatctagttcttttctatactgattaatataattagctcccattgcttctgtcatctctggtttgcctagtctacttaatgctactgtcaccccggctaaaccccgatctaaggcacggggtgaaaatggtgtgacgcttgttgcttctacggctcggtaaaatgtggtatgccaatgggcaaaacgttcatagtgtgagcgatcgcgtgggcggtggatattcagtaatgttactactaatcctggttttttggtatctctcccgactcggctggtagcttggatatattcggctgcggtcttgggttgccctaatactaccattaatcctagtctggtaatatccaagcccacagatatcatatttgtggctaaagcgacatcaactttttccgtttctcgaaatggtaatgctaaccggcgtttggtttctgctactttattggtgctgatgcgggatgttaactctgtgggttcgtcgtctattttgcggttagcaaataaaccggctgtttctccgtaacgtcgccgttctccgtatttgatcagtcgggagtttacctcatcttctactaagcgccgacttccccccaattctcgcaaggagttaaaataacctaacaaggtcatataaggatcagcagggttttcagggtttttcttcccgcctaattctaaccagattttctgtgccgctcctaataatgctaaataagattgcaataatactacttttaaactgcgtccttgggcggctactcctacatataaacgccctggggagtctgtcacaggtacggttttagcaaaaaacgaatcatggcgatctggtccgggtgggggaaatatttccacctgttgacgggcaaataaagcctggatctgtctgtctgctcggcggactgtggcggttgaggcgataattttcgggcggacatttacactattataacttattgtgcagagagcgtcaatagcagtttcataaagtcctaccattgttcctaaaggtccagaaattaaatgtaattcgtcttgaattactaagtctggagggggtaaaaaggtctttaatttttttaagtttgttcctgtaacttttgcaggtgtatctgcgtgactaaaaaaaccaagtttttgatcatgatgagtaactttaccgaataaggccgcagtttgtcccacccaaggtaagttagcaaatttatccacggtggcaatgataaaacaaggaagttgtcggtaaatttgctcatctacggcgataataggcagaaaattgttacctttccaaacacaggcgggttttccgtcggggtgggttttgcggttggaacaggaaacttttaactctgtgggataatcggcattgggtaataattgaaacgctcgaccggataattctgtaccacaccaaggacatctttctaaaggtatgggtttgggtttgattttttcttcctgttgaaaagctattgtgcgttcacgggcggtattttcgtttttgtcgccttttttacccattttgttgggtgtagcactgtctcctacccataaaccaatattaaacggatgttgaccgagtatgtctgggtgttgttgtcgttgtaattctaaggcacagatgagagttgtggctcgttctaattggtcaagggtgagtaagcgtagggtataacgcattaaaactgtgagaccggcggagtaaatgctagggtctttgagacgacgtaaaaccaaggtaaaagcagctaaaccgagataagcttcggtttttccgccacctgtgggaaaaaacagcaaatctacggtttctcggtctgggtgggtaggttggctaatactgacaagattcaggaggaggaaagctaactgaaaaggtcgccatttgggggtaggtgcgtcactaggggctttatttgggttatcttgacaaaaacgctgtcggcgggcagttgctagggcttggttagctatttggaaggcttgaaatactagggggtcgtctaattcttgtagacctgcggcaatacgttgattaattatattagctttgtttaataactcttgggcggttttggctaggtggggttggggggggataagttgaagttgttgagatatccagtttgcatattccgtcactatcgccccaatcatatcacgaacagtatcagcgttagaggcttgggctaaagcttccattcccagttctaaaccggcgatatttgcagcttccaccctggggacttctgcggtgggtatccaagtggtagaaatttcttgacattggttattttccaggagtgcaagcgcagagatattatgaccaactgcatattcacagtcatcacggtattggagagatgcgatcgcctcatcttggtccagggtattttctccccgcaagtcaggacgaggaacaaatatatctgatatatctgatatatctgatatttctgaagtgcgaatagttaaacctgcttgaaaaataaaactttcatcttgtttactgtggggttgataaacacgatggttaacaacaaaaacagaaaccgactgtgtaccgatgggaagttgaggagaagttgcaacgggacgacgggaaatataaagttttaacccactatttaaaccatctcgatcactcacatcaagagaaatttgatcataattggcaggtagggaaattggtatagtaataatattaggaaagcgatgccataatatttctgttgggggtttgctgggttgatcttcgttattattttctgctgaagtttctatttcccgttcttggggttgatagtctccccattctacagttacttctaatttttcagttgttgcaggaactaaaaaactcaacccgatggaagaagggaaaggtgcttttcttgcagcagcagtttctggtgttttggcatcttcagcgatatctttattagtaattacttctattgtatcatctgctgtggggtcatatttcatttctaccggcgcaccaaagggaactaaaaacccggtaagataccatttagatgggggttggtttaaaatttcggtttgatattctaggtcttgggaactaggaccgattaaatctaattttagggctttttggatataggcgcgaacatcttgagattccatatttttggggactggggactggtgattggtgattggggactgggatataattattttattctgtaggttgggttgacgcaaggaaacccaacattttaatttaacgcagatgaacgcagataaacacagatgatagatgataagattatcattttttgtctgaatcaggatgtccaggatttgaggatgtacaggattgtttttttaagattatcattttttgtctgaatcaggtcgttatcgagtttcgactacgctcaactaccgcgacttgtactgagcgacttgtactgagcgcagtcgaagtaagtcgaagtaagtcgagataatgtccaggattataggatttatgattaacgtcacgcttcgctatcaggatgggatttttataattttataagattatcttttttgtattcttgatgattttatattattttgataatttataaacaaaatcccgtacatcctataatcctggttatcctgattcagacaaaataaatcatcaataaaaaccacaatctctaaacaacatcccgtacatcctcaaatcctggttatcctgattcagacaattatcaattatcaattatccattatcaattatcaatcacatcccgtacatcctcaaatcctggttatcctgattcaaacaattatcaattatcaattatccattatcaattatcaatcacatcccgtacatcctcaaatcctggttatcctgattcagacaattatcaattatcaattatcaattatcaattatcaatcacatcccgtacatcctcaaatactggttatcctgattcagacaattatcaattatcaattatccattatcaattatcaatcacatcccgtacatcctcaaatcctggttatcctgattcaaacaattatcaattatcaattatccatta

SEQ ID NO: 118 - DNA, 10420 bp, Sphaerospermopsis sp. LEGE 00249
  LEGE00249_141
tctcttcagtcttggcgacgcgtccacgaaaccaacttggacggcacattcttgggatgcaagcacgcaatccaggcgatgcggaagcatgctcgcccctctgcgatcgtaaacatttcctcacgctcagggttggtgggcattccttcggccgcagcgtatgcgtcaagcaaggcggctatccgaaaccatacaaagtctgttgctttgtactgcgctgagcagcgtcttcggattcgctgtaattcaattcatcccggtgccattttgaccccgatgtgggatgcctttcttggcgttggcgaggagcgcgagaggaacatcgctcaattcgtttcggacacaccgatgcggcgttttggcaccgttgaggaagtggctgcactggccgttttcctcgccagtgacgagtcgtcctatgtcaccggcgctgaattcgtggtggatggcgggattactgcaggggcaagcgctgctcctgagaagtcggaaagctgaaggatcacgtcccaagtcctcggtcgaacggcattcaaatgcagtcatgccccttcagacgagcgtccgcttcggggcaaacgcgcgcctcggctgcgaggttggatgattgctcttacctgcggcaaatcgcaaaacgataagaaggaatatggcaatggttttctctttcagaacgggcgccattctgatggcgctcggcatcgcttcgactactcaggctcaaggcgatccggctcacgagatcgcgcggttcgaaagagcgttcgcgccaactggcatggccgttgcgctgatcgaagacggcaaggtcagccttttgcacaccagcggtatgcgaaaggcgggccacagcgcaaaggtcgacgacgagacaaccttcaccatcgcttcggtgggaaaggctttcgtggcagccggtctggctgtgctcgtcgatgaggggcggctgaaatgggacgacccggtcgtcatgcacttgcccgagttccgttcgacggacccatatgtgacgcagaacctgacgatccgcgacctgctatcgcaccgctcgggattgccgctgggcgctggcgacctgctgacatggcccgacgggcaggccagcgtagacgaggcggtgcaggcggtggcccatctaccggtcgagagttttcgcgaacgcttcatctacagcaacaccatgtaccgtgttgcaggggccgtgatcgaagcagtttcggggcagacgtgggacagcttcatcaccacgcgcatcctggccccgctcggcatgcatggatgcacaatcgatccgcgagacgctgatccacgatctcgggcttaccagcacatccgcaccacgcctaaggagccggctcaacttatcgacgagctgatcgaatatcccgatccagccgggggcatggtctgcaccatcgccgacctcgcgatatgggcgcagttccagctcggcgtgctcgagcccgagggcggcaaaccagtgcttaccagcgaccggatagcggaaatgcattccggcgcgacgcctcgccgagcgtcgggacaggtgcgccgcctggctggtaccaacctggcactttacgggctcgggtgggaggtatccgactttcacgggcagctgcttgtcgagcattccggccaagcagcaggcggcttggcgcatatcgctttgttgccagcacgaaaggccgccgtcgtaaccgtcgccaacgataacgccaccccggtagcaacgctcaactatcacttgctggcgcacctcgcggcaggcgacaacgcgaaggactggattgacgacctcgcggcgaggttcgcgaatgcgcctgtatccgcgcctagggccggcggcaatccaccgcgtaacatctttgtgcccgcacggccgctcgcggagtatgccggcatctatcgcgacccttggtacggtgacataacgatcacgcacggtagagacggacttgtcatccacatgacccgctctcgcctgctgagggggccgttggtgccgatcgagcccgatcagttcatcgcagagtggccgaacaggagcctaaatgccgatgcagccatcgcgttcactcgcgataacgatggcaaggtcaccggtatggcgctggaagctgtgtccgaagcgactgatttttcgtatgactttcatgatctgagaccggtccgcgtgacggagagccatgaacactagctcgaggcatcgcgccgtggttgccagcgccgcgggggcgatcttcagaatgcgatcaagacctagtcccaacaatagctgttattcgaacggctgcttgagttcccgacgtctccccggttcttagtagcgccgcttttcggaaaagaaggccacgaacgaaggtccgctttgggtcgcaagcggaagctcgaggagtacggcatcccgacggctgtgctcatcactaggtcggccagtttcgcactgcgcgctggtcaaagcgaaatgacgacgagcctcctcgacgacgctattttgagcacctgcccatcccacccaagggagtgcaagggactgagggcggcccacgcgtcaccgggaagttcggcgcctcgcggtccgggtactgctgtttgggaaggcatcgtccttacgtgacgcgggagatctccggcctgatctagcggtgtcgatcgacgcgagcctagtccaggaaaacggaaacgctcggcatcaccgcgtcccagaccgctcactggacgaaagcccaagggcagcagtcgacacccgaccgacggccttccacactcggcgcatggacaccctgatcgtgctgatgcagagccatgggctctggatcgtcttcttcgccgtgctgctggaccaaggcggcctgccgctgccctcctttcccgtcgtggcggtggctgcggccttcgcccacggcgacccaaccgcgctgacgcagttgctgctcgtagccaccgcggccggcctgctggccgatgcgttctggtacgtggccgggcgacgctacgccgcacggcttctggagtggatttgccggatctcgctgtcgccggattcctgcgtctccggggcacggcagagttacgcacgcttcggcgcgccctcgctgattgccgcgaagttcgttcctggattcgcagccttggccaccgcgctggccgggcagtaccggctcggcgcattccggttcgcgttctgggacggtctgggctgcctgctgtgggcgggcaccgcgctggtgctcggcgtggtgttcgccggtgccgtgcgcgaagtgctcgacaccctcatcgagcttggccgctggggcttgcttctcacgacggcagtgatcgcggtctatatcgggcgcaaggcgctggaacgacggcggtttctcgcccagatccggatggcgcgcatcggcgtcgacgaactggccgaacgactggccagtgacccggcacccatcgtgctcgacgtccgcccgcgcgccgtgcgcgaggcggagggctggattcccggcgcgctcggcgtggacgatcccggccaggtcgaggtagcgccggacgccgaagtcgtcatctactgcgcgtgccccaacgaggccagcgccgcggtgctggccaagcgcctgatggcgcgcggcgtggtgcgcgtgcggcccctcgagggcggtatcgccgcctggcgcgccaagggcttccacgtcgacacgccgcccaacttcgaatgaacgccatccgcacgcccccgagccgggaacagatcctttactggctgcacgaggccgccgagctcgagcacaacctgatgtgctgctacttgtacgcggccttcagcctgaagcgcgtggacgctcggtggtcgccgcaggaggcggcggcggtgaagcgctggtacgggcagatccagtcggtggcgctggaagagatgggccacctgtgcatcgtcggcaatctgatgacggcgctaggggccaatccgcacttcaaccggccgatgttccccgtggaagccggtccgtatcccgccggtttcgccattcgactgcaggccttctcggcatcgacgatcgaccacttcctgttccttgagcgcccggaagaggcggccatcggcgacggcccgggcttctctcccaccggcgagtaccgccgcgaggtgcccgaaggtcgactgagtcccggcgccatcgactacagcacggtgggccagctctacaacacgctggccgcggccttgcgacgcttcgtcgagacacacggcgaagccgcgctgttcatcggcgatcccggccagcaggtgacgcagagcctcgcaccgctgcccggcgtctgcgccatcaccgacctcgattcggccctggcggggctgcgcatcatcgtcacccagggcgaaggtgcggcgcgcgatcaggtcgattcgcactttcaccgcttcgagcgaatgaaggcggaactcgaggccatgacggcagcgaatccggccttcgaaccggcctggccagcagcgaccaatccggtgatgaaccggccgctgcgcggcgaacgcgtgcacgtcaatgcgccggacatcgcgccttggctcgatatcggcaatgcgctgtacaccacgtcgctgcgctgcctgatgcaaggcttcaacgtgaagaacggtgaggccaagcggacgtggctggccgccagctaccggctgatgcgcgccgtcgttccagtgggccagggcctcgcggcccgccccgcccaaacggacggagatcgtgcccacgccggcctcacgttcacttcgctgcgcacgctcgcggtgttgcccgagcgctccggcgcgcgcttcgtcgccgagcgcctgcgcgagctgaagacccgcgccgagtccctgccgctcaagctggtggaaggcgaataccccgagctgtggcatgacgtgatcgccagcctcgacagcgtgaccgcatcactggaaggactcgccggtacgccggccgcgctgcctacgcctgtgcgcgtcgacgcggcgccgatcgcagacgcaacgcccacgccccacacggccgcgcccgaggcaaaggaacccgagcgcgccgaaggccgggccatcgcgatcgagttcgaagccgcgcgctgcatccactcgcgccactgcgtgctcgaggcccccaccgtgttcaaggccaacacgccgggggaatggatctttcccgacacgctggaggccgagcggctcgccgccgtcgccctgaactgcccttccgttgcgatccgcttccgccgcaaggacggcggtctcgacgagtgcgcgccgcccgtcaacacgatgaaggtgcgcgagaacgggccctacgccttcgccgccgagctgcacatcgccggcgaacccgccggcttccgcgccacgctgtgccggtgcggtgcgtccaagcgcaagccctattgcgatgggagccatgccgaggccggcttcgcagccaccggcgaaccgccactgcgcgccatcgacccgctgccagcccggaacggtgaactgcgggtcgtcccgcggcgcgacgggccgctcgaggtgtccggtccgctcgaactgtgcgcgggcaccggccgcgtgttccaccgcgacaccgccgtgcgcctctgccgctgcgggcagtcgaaaaccaagcccttctgcgacctgtcccacctcgccgcagggttcgtcgccgagggggagtgagcgggcgcgcgacggcgttgcagaaaagtttcgggcgcctgtcgattccggccctgcccgcccgtcatggtggatgagcgcccgattcgcgggcctcgaatcccaaaccccggagtgacctatgcagtacatgctcatctaccgcgagaccgccgccgaactcgcctgccgcaatgatcccgagaaggcccccgcgtattggggtgcctggcaggcctacgtcggcgccatcgcccaggccggcatctctgtcttcggcgcgggcctgcagccgccggaaaccgccaccaccgtgcgcctgcgcggcgaggagcggcaggtgcacgacggccccttcgccgacacccacgagcatcttggcggcttcttcgtcatcgaggtcgccagcctcgacgaggcgctggcctgggcgagtcgcgcgccttctagtctggcggggagcaccgaagtgcggccggtgcttccgcccccgccggcgcagtgacggacgcggccacccggccagtgatcgaggcggtcgcccgtgagcattacgggcgactcgtcgcgctgctctgccgccgcacccatgacccggattcggcggccgatgcggtcggtgccgcgttcctggcagcgctcgaagcctggccccgcgttggggttcccgagcgaccggaagcctggctgctgacggcagcacgccaccatgccgtcgagcgctggcgccgcgagaagcaccacgccaaccaggagcctgtcgtcatcgaggccatcgaaagcctgctcgaacaagccaacgctgcgccgaaggacatccccgacgaacgcttgcgcctgctcttcacctgcgcgcacccggcgatcgacgccaaggtgcgggccgcactgctgctgcaactggtgctgggcgtcgacgtgccgcgaatggccagcgccttcctgacgtcgcccgcgacactggcgcagcgactggtacgcgccaaatccaagatccgcgatgccggcatccccttcgacgtgcccgagccgagcgagtggtccgatcgcctgcacgacgtgctcgaggcggtgtacggcgcctacaccacggctttcaccggcgacggtgccgaggccgctgcctcgacgacactgcgcgacgaagccctgtacctgtccggaatgcttgtcgccctgctgccggaggaacccgaagtgctgggactccgcgccttgttgctgcataccgagtcgcgccgcgcggcgcgcttcgacgaaacgggccgattcatcccgctcgccgagcaggaccccgcacgctgggatgcacgcgccatccttgaagccgaagccctgctcatgcgctgcgcctccttggccaacccaggggcctaccagacggaagcggcgatccattccgcgcacgcgacccgtcgattcggcgggccgatcccgtggacccagatcgcgttgctgtatcgctttctcctctcccggtggccttcccacggcgcacgcgttggcgccgccgtcgccttcgtcgagtgcggtcagctcgaagccgccgaggaagcgttgagcgccgtgccaccggcgcttgctacgacctacccggcgtggtgggcagcgcgggcgcaccttctgaccgccatgaccgacatcgagggagcaaggagcgcgctgcggcacgccgcgggactcagcggagaccctgcgctgcgcgcgcatcttctagagaaagcggaacggctcgtgactgtcgtaggcactgaatcgcgataagtcgacgcaacagcttttgatggggccacggcgcgccgtcccggccctcgcccggggcatctgccggggatcgctcgaggaagacccgaacagttcgcggcgctgctttatccggtggcgcgctcggcgcgagccgcgaagcacccgaaagcggcgtaatgcagatgaacatacgccacggcaggctgggcgagcagcgcctccagcatgggactcaacgcgctgccttcgacgagacgtgcatccacggccagatggtccgaagagaatgcccggaccgacagcgtccgacgcgccagcgccggtggaaccgcgtcgacgtacgtcgccggagcgtccgcgccctgacggagatagaccgcgtagcgcgaacggtacggcgtatcgactggcaggtgatcgtggttgacgaggagcaccgtttcacccaccggcacatcgtccaggccgacgcggtccggaaagccggggcaatcggtgacggtgacgcgctgggcgtgctggcgggcgagcgcctcatcatcgagagcccacaaggcgctgtagggcgaagggtcgatgccgcggatgacgaaggccatgggacgctccaagggatgaggcgcgaagcatcccgcgcggtccgcccttccgtcgctccgtttcttgcaccctgacggcgacccgatgcgccggcgtcgtcgacttccgtcggccacacagcccttcctgcggacgtcgatggccgaagagactccgagcgggttgctcgagtgcggatacacaccggaacgcgagttggacgacaatgtgacgcatggcccaatccacgcgcaatctcaacgtcctcggcactccgctcgaagactgcagccacgacccgaagaccggctggttccgcgacggctgctgccgcaccgacgaccaggaccgcggcagtcacaccgtgtgcgcgaaggtcacgacggagttcctcgagttctcggtgcgagccggcaacgatctcgtgacgccgcggccggagttcggcttccccggcctgaagcccgggaattcctggtgcgtgtgcgcttcgcgctggatgcaggctttcgaggccggtgtcgcgccgccgatccgtctggaagccacgcacgagaaggccatgcagatcatcccgctggccgccctccgataccacgcgatcgaggacgacgcggaggagtgagcctgccctcgacccgcggcggcgtggtgcaatagcggccgcccacgacaggaggcctgatggccacgacgacggaaggcttcatcaccagcagcgatggcacacgcctgttcttccgtcgccacgtggcggcggcgcccaaggcgcgcatcctcgtcatccacggcttcgccgagcacagcggacgctacctcgaactgctcgacgcgctggccgaagcgggcttcgacgccttggccttcgacctccgcggccacgggcgctcggagggtcgtcgggcgcacctccgtcgcttcgaggactacctggacgacacccgtgccgccttcgcggcgctcacggcgggctcggacggcaccgcgctcgtgttcggccactccatgggcgggctgatcgccacgcatttcgccgcctcggaaccgcagcgctgccgcgccttggcgctcagcggcccgatgttcgcccgcgcgctcgccgtgaacccgctgaaactgctggccgcccatgtgctgggccggctcctgccgattttttcgatgccgagcggcatcaccggagcgcacctgacgagcgatccggccgagatcgcgcttcacgacgccgaccagctgatcctccatcaggcgcgcgcgggctggttcatcgcgctcgaagccgcgatggcgtcagcacccgcagccgtggcgcgcctgacgatgccgctctacctgatgcacggcgaggccgacccgctgaccgccttcaacgcaagccgcgcgcttttgccctcggccccgagcaccgacaagaccttcgtggccctacccggcatgcgccacgaaaccctgcacgaagtcggccgcgaggccgtgcgggcgaatctcgtggcatggctggcagcgcatgccgagctcagtgcacgcgccaatgcctgacgcgacacgcccaccgtcccacgccatcgtccgccagccggcgcgtagcctgctcgacgcctgcgaactgacgcacctcgatcgcgtgccgatcgacgcaaccgggatcgaacgcgagcacgcggcctaccgcgacgcgctcatcgcgatggggctcgccgtgacagtgctgcccgccatcgaagcgcacccggatagcgtgttcatggaggacacggccgtcgtgctggacgaagtgctggtgctgacgcgcccgacgctcagccgcgaagcggagccgacgcatcttctcgccgaagccggcgatctcgggcgatccgtcgcgcgcatcaccgcacccggcacgctcgagggcggtgacgtgctgcgcctcgggcggcgcttgatggtggggctcaccacccgcagcaacgcggaaggtgtgcgccaactgcgcgccctcgtcgaacccttcggctacacggtggacacgttcgccgtcggccgcagcctgcacttcaagaccgcctgcaccgcgctggacgatgggctgctggtggtgaaccccgactgggtcgatggcgatgctttgcgtgccctaggcttcgaaaccctcgatgtgccggccgacgaaccgttcgctgccaacttcctgcgcgtggacgaccgcgtactcgccaacaccgccgcgccgagaaccctcgcacgcatccgcgaggcgtggcgcgcccgcgggcatgcgccggaggcgctattcgagacgccgctcgtggagttcggcaaggccgaagcaggcctcacctgcctcagtctcgtgtactcgggtcagacctcgaagtgatcctgcttcggcaagggataaggatcgtcgccctcacgcaccggccctttcatcacacgcaccacccagcagccagc

SEQ ID NO: 119 - DNA, 10377 bp, Sphaerospermopsis sp. LEGE 00249
  LEGE00249_142
atgcggtgcacgggatgatcccgcgcccgctggagcccacggtggttcgcctcgcgcgcgagtccgacgacgtgctgggcgggttcctgcgtggccaggtgagcgtgatgatcgcgctgggcctgatctacggcgtgggcttgagcctcatcggcctcgacctcggtttcctgatcggcatgatcgccggcctgctcagcttcgtgccctacctcggcacggccatcgggctggtggcggcggtcatcgccaccctcgtcgagcacggcgatctcttccacctcgtcctcgtgtgcgcggtgttcagcggaggccaactcatcgagggcttcgtgctgacgccctggctggtgggcgatcgcatcggcctgcatccggtggcggtgatcttcgcgatcatggctggcggccagctcttcggcttcctcggcatcctgctggcgctgcccgcggcggcggtgttcatggtgctgctgcgttacgcgcatgagcgctacacgcagagcctgctctaccgcgaggaccgcgacggcgacggcgttctggaaggcgaggctgaaggcccacccgccgacgaggctggcgacacgcgtccggcatgagcgcccagctgccgctggcgctgccggtggggccggaccagcgcttcgaactcttcgtcggccacgattgggccgtcgaggtgctgcgtgctgctgcgacgggcgaacgcgtcgatgcgtcgctcgatgccggcctgttcgtcgaaggcgtcgagggcagcggcaaaagccacctgctgctggccgcgtgtcgcgaggcgcacgaggccggacgtcgcgcacgctacctgccggtgccggccttcgccggcgcgctgggcacgatgctcgagggcctcgacgcgaacgacctcgtcgccctcgatggcatcgaggccgcggccgcctcgcgggccgactgcgaagccctgttccacctgcacaaccgcctgcgcgatgccgggcgcacgctgctctatgcctcgcgcttgccggcgggtgacatggcttgggcgctgcccgacctgcgctcgcgcctcgggcagggcctgcgcgtctcgctcgacgtcctcgatgacgacgggcgccgcgaggcgctgcgtcgccgcgccgcgcgccgtggcctcgagctcgacgacgccgtgctcgactggctgttccgtcgcgtcgaccgcgacctgaaatccttgacggcgctgctcgatcgcctcgaccgcgcggcgatggccgcgcagcgccggctgacggtgcccttcgtgcgccaagcgctcgatctcgattgaccatcccgcggcattccggccgcgatgcaagggaggccccatgaacgtcctcgtcttcctcggttcgcgccgcgcgtcgtccccgccgaatccgccacgactcggcgaacgcgtcgcgcggcatctggtcggcgaagcgtcgacgtctttcgacgtgcaattgatcgatccactggccctgccgctcgaaccggtgttccgcccggtgttcacgcgcccggcggccgaggtgccgcccgcgatggccgagctgcacgcgcgcatccgtgccgccgacgcctatgtgatggtcagccccgagtacaaccattcgccgagcccggcactcaccgacctgctgaacgcgttcccgagctcggccttcgccttcaagcccagcctgatcgcgacgtactcgtccggccagtggggcggtacgcgagccgcggtcggtctgcgcacgttcctctcggaactgggctgccttccggtttcggcgatgctgcactacccgcacgcggatcgcgtgttcgacgcggagggccgtcccgccgcgggcgaggatgcggcccgttgggccagctacgccgcgcgggggctgtcgcagttggcgtggtgggcgcaggccgcggcggcccagcgcgaagcggtcgatccgttcgccgcgtcgccgccgttccggcgccgtcccacggagcgcgacgccccgaagggttgaacctcagcgcagggcggcgtcgagggccgcaagccgttcgggcgtgcccacatcggtccagcggccgtcgtggcgctggccggtgatcgcgccgcgagcgatggccgcatcgaacaacgggcgcagcttgaagcgcggcggcgtttcgttggcgccgggtgcgtcgccgacgatgccgcgccagccatcgaggaactcgcggcggtacaggccgatgccggagaaggtgagcgcctcggcgccggcggtcgcgagctgcaggcgcccgtcgtcgcggagggcgaaatcgccgcggccgtggtgttcggggttcgccaccatcagcaggtgcgcaaggccctccggctcgcttggtagcgcgcggaaatcgaagtccgtccacacgtccgcagcgatggcgaggaagggtgcgttgcccagcaagggcagggcgttgagcatcccgccgccggtttccagcggctccgggccttcgtgcacgtagtgcagtcgcaagccccagggggcgccgtcaccgagcgctggcgcgaagcggtcggccagccaactcgtgttgatcacgacctcgcgcacgccgagcgcggcgagcttttcgaggtgccaggcaatcagcggcttgccgccggcgacgagcaggggcttcggcgtggtctcggtgagcgggcgcatgcgctcgcccttgccggcggcgaagacgagggcgtgcgtcgggtggtcgctcattcgggtggcggatcagcgcgacggcagcgcgccgacctgcggcagcacgcgctcttcgatcaccgcctgcaggggctgcagcatccggtgcttcgggatcacgtcgagcaggtagcgcacgaagcgcggcgcgtcggcgaggtatttcggcttgccgtcgcggtggttcagccgcgcgaagatgccgagcactttcagatgccgctgcacgccgatgaggtcgacgtcgcggcggaagtccgtgagcccctgcaccggcaggccggcggcgctcgcgcgctcgtggtagcgcgccacgccccagtccacgagctcctgcggccagccgtggaaggcgtccttgaacagcgagagcacgtcgtagctgatcggcccgaccacggcgtcctggaaatccagcacggcgaggccgccatcgcgaagcggcatcaggttgcgcggcatgaagtcgcggtgtaccagcacggtgggttgcgcgaggatggcgtccatcagccggcggtagaccagctccagcgggtcggtcagcgcgcagtcgagcgggtggcccagatgcgtgcccagcagccagtcgtcgaacagcttcagttcgcgagtgagcagggcctcgtcgtagcgcgggaagccggccggcggggcgatcttctgcagcggcaaaagctggtcgagcgcggcatcgaaccaggccgcggcgttcgattcgtcgacgacctgcagcagggtctgcgtgccgagatcttccagcagcaggaagccggcctcgacctcgcgggccagcacgcgcggcacgcgcacgccgccgtgttcgagcaggtcgcggatcgcgagccatggccgcacatcttccttgccaggcggcgcgtccatgacgatgcgcgtcggctcgccactgctgcgccagtagctgcggaagccggcgtccatcgacgcgcgctccagcattgcgccgtgatcgcccagcgccgcacgggcgaaagcgaggcggtcgtcggcgcgagcggcgtcgtcggccgttgcggccgttccggtgttcgtcatcgcgtcacttgcccttcagcgccttgaccagcgcgagcagcgccaccgcgccgcccaccgcggcggcgaagcgcatccagcgcccgccgacggtgatgtcgaaggtgtccagcacccacgaggcgcaaatggccccagccatcccaagcaacgtggtgaggatcaggccgagcttctgcttgcccgggaagacccagcgcgccagcaggccggcgacgaagcccagcagcaggatctgcacccagccgtagccgaggaaagcgaggtccatcgagcgttctccctagagatcagcagcagccgtggtcgccgaattccgcgccgccggcggccacgccgacgccgcgcgtgaggcccttctgcgaggcctcgtagtgctcggcgatcacttgcgccaccgcctgcgtcacgcgcttgccggtggggatgtgcaggaattcgttcgggccgtgcgcattgctgtgcgggccgagcacgccggtgatcatgaactgcgcgcccgggaacttctcgccgagcatgcccatgaacgggatggtgccgccttcgcccatgtacatggccggcgcgccgaaggcgtgcttcgacgcatggtcgatggcgtgcgacagccacgggctcatcgccggggcgttccagccggtgctgctcttctccagctcgaagctcacctttgcgccgtacggcgggctcttgatgagcgcgtcgcgcagcgcgtggcccgcggtcttgccgtcggcggtgggcggcaggcgcatcgacagcttcaccgcggtgaaggggcgcagcacgttgccggcgttcgacagcgagggccagccctcctggccggtgaccgacagcgcggggcgccacgtgcggttgagcaccagctcggccaggtcgtcgagcgcgggctgcatgcccttcacgaaggggaacttgctgtacacctcgtcgccgagcacggccgcggccttcttcgcctgctcgatgcgctccggcgggatggcgacgtgcagggcgtccagcgtgacgcggccggtctcgatgtcctcgatgcgcgccagcaactggcgcagcacgcggaacgacgacggcacgatgccgctggcgtcgcccgagtgcacgccttcgtccagcacgtcgacgcgcaggttgccgccggcgaggccacgcagcgaggtggtgcaccagagctggtcgtagttgccacaaccggagtcgaggcagaccaccagcgaaggcttgccgatgcgcgcggcgagatggtcgacgtagaagggcaggtcgtagctgccggattcctcgcaggcttcgatgaggatcaccgcgcggcagtgcggcttgttctggtcctgcagggcctggatcgcggccagcgaaccaaaaagcgcgtagccgtcgtcggcaccgcctcgcccgaacagtttgtcgcccttgatcaccggcacccaggggccgaggtccgggtcccagccggtcatctccggctgcttgtcgaggtggccgtagagcaggaccgtgtcgccgtccgcgccgccgccgtcggtgcccgggacctcgatgaagatcagcggcgtgcggccctcgaggcgcacgatctcgacggtcatgcccttcaccggctgccgcttcgcccagttggcgagcagctgcgtggcgtcttccatgtagccgtgctccacccagtcggcgtcgaacatcggcgacttgttggggatgcggatgtactcgacgaggcgcgggacgatgtcgtcgtcccacatctggccaacgaaagactgggtgcgggcgtggtccatggcgggctccgtggcggccgcggcgggccgtcgtgaatggcgttcctcggattgtagtcggcgggcggaccgggggtaggaaaattcctacaagacgtcgcgcagaactcctagccgacatcgggcgctcggtcgataacctgtcgcccgtcggatcgcgatgctgtctccaccgcggcacgaaccccgccgcggccccaaggatgacggacacggagccccccaatgaacttcttcagcaagactctcgccgcgctgctgctggccctcgccttcgccggcacggcccaggccaacgagcgcatcaacatcaacaccgccgatgccgccacgctggatcgcgtgatggacggcgtcggcccggcgaaagccgcggctatcgtcgagcaccgccgcgtgcacggcccgttccgctcgatcgaccagctcgtgaacgtgaagggcatcggcccggccacgctcgagaacctctgcgccttcatcgcgcgcgaactgcagccgtcgatgccgctgctggtgcgcgtgtccgtgttccgcccggcgtcgggcgaccgcgccacgcttcagctcggctgaggaaagccctcgggcagggcgaggtgcgctgtgagcgtcgccgggtcgacacccggggaatgcggcaagcgtccgaaacacggcaccggcagcgcggccttcagggcttcgaagtagtcgtcggggaagagcatcgtcggctcgacatcggaagcgatccaacccagcacgcggaagccgcgcgcgtgcaccgcctcgacggtcatccgcgcgtggttgatgcaacccagcttcaagccgaccacgaccagcacaggcaagtccagcgcacgcggcagatcgcactggtcgatggcggcgttcaccggcgcgaggaaaccgccgacgccctccacaagcaccacgtcggcctgcgccgtcaactgcgcgaaggccgcttcgatcggcggcagggtcacctcgatgccatcgaggcgcgcggcgatttccggggccgtcggctcgcgcagtgcccaaggattcaccagcgcgtaatcgggccgcggatcgctggccgcctgcagcgcgagggcgtcctcgttgcgcaggccttcgggcgtttcgtcactgccgctggcgaccggcttcatgcccacggcgcgcaggccgcgctggcgcaaggcgtgcaggaggacggtgctggcgaaggtcttgccggcgccggtgtcggtgccagtcacgaagaaagcggttgtcatggggcggaggatgccaaagcggccgcaagacggcgtcgatgccgcatgcgcaggccgacttgggcgaaatgcatgacgaagaagatcatccccggcgcgccgtagcgcagcgagtccgtccacaggctcaggcccagcgacaccagcgagaacagcggcagcagcgcccactgccgcatcaccaggcgcagggcgaggacttcggccgcatccaggccgagtgcttcgcgctggcgccaggcatggtggttcaacgcccacagcaccgcccccatcgacccgaaggcgatggcgaaggtctggaacatgcgctgcacttcggccaacgtgccgaagggaaagttcgacggcagcgcgccgccgctgatccagtcgaagaagacggcgaagacgatcttcaacgggaagacgaagatcagggtcaggaagatcagcagcaggctccactgccggctgcgcggatcatccaatccgaagcgctcgctccagtcgacatggccgcgccagaacgtggcgatcagccagaaacaggcggcgaaggccggtacgcccttcagcgccgccgccagctcgtcgggcgagcgcggcacgctgcccacggcgatcaccatcagcgtcaaggcgaaggcgaacgccgcatcgacgaaggcctcaaggcgagtcgtccgatcgccgcgatggcggaagcccaattcgtcgcgcgcgccgccgccggccgccttgccttccgctgccgcagtccccatcgttgccctccccggccgcgcaacgcggcccgctgaaccggattctagagcgcatgtccttcaccaccgccgccctcgagggcaccaaggccgagcagtacgcccaactcgtcgaccaggcccgtggcctgatgcacggcgagcccgaccgcaccgccaacgcggccaacctgtcctcgctcgtcttccacgccctgcccgacctcaactgggtgggcttctacttcttcgatggcaaggagctcgtggtcgggcccttccagggcctgccggcctgcgtgcgcatcgccatcggcaagggcgtctgcggcacggccgcggccacgcgccagacgcagctcgtccccgatgtcgaagccttcccgggccacatcgcctgcgattcggcctcgcgctcggaagtggtggtgcccttgttcaagggcgacacgctggtgggcgtgttcgacatcgacagcccggtgctcgaccgcttcgacgccgacgaccagcgcgggctggaagcgctcgcggcggccttcctcgacacgctgacctgagcgcgatggccacgccgcccaagctgcgcaacatcggcccgaagtcggccgcgcagctgcgccaggtcggcgtgcggacattggacgacctgcgcgcgatgggcagcctcgaggccttcgtcaagctcaagcgcgcgggcttcaagccctcgctcaacctgctttactcgctcgaaggcgcgctgctcgactgccattggcagcaggtgcccgacgaacgccgcagcgaactgatcctcgccgccgatgccgcgagcgcggcgctgccgaagacacagccgcgctggttcagcggcggcaatgcaccggcgggcgtcgtggccggaggcgacggcgacggtgaaccgaatgccgacacggacgagagcgcggacgacggtgggagcgacggcggaggcgactgaggtccgccggctggctgccccggattgggccggcacacatcgcttccacggcttcgggatggcaggctggggttccgcacctgcctgagcattcgccatgcgcctcgtgatcgccgctttcgccgtcctcgccctggccgccagcagcctgctccaggctgcgcccctcgagaacaaatggcgcctgcagttcagcggcaacgcccgctccgacggcacgctggtgcttgcgatcacgccacggagcggcgggaccgtcacggtgcccatcgaggtcgcttcgggcacccgggagaacatggtcgccaagcgcgtcgtcgacgtgctgcgcgaggccatcggggccgactacaaggtcgagcgcgatgacggcgaggacgtgctggtgaagcgtcgcctcggccgcgagcgcttcaacgtgacggtcgtgagcaactccatccgcggcgttcgactgaatctcgaccaagagtagttcgagcgaattgcgccacatcgcacatcggcgttggctcccgccttccatggcaggacaaccctcggcaccgacgcggaggcgggcagtaggagacctccgcggtgcatcgcgagtgtagtcagggcgagccgcgcccacggcgacgcgacgcgtgcgacgccccagtttggggatgcggaaaacggggcggaggccggtcggagatgacccggccaccgccgtgggcgcatggtgtggactggatgtggatcgtcccatgacggagcaaccgcgatgcgcctgaattccgctcgattcggctgggcgtttctcttcctcgtcgtggccgccgatggcctcgcacaaggcgccacctccccagccgtggagcaggagggcagcctgcgaacggaaacgctggtgcagggccgagtgcccttgattgggaggggctatcgcctagcgtcggaaacccccgttcgcgatttcatgggccgctaccgcatcgagtccgacctcggcagcctggaggccgtcggcctcgaggaacttgagcagcgcgtgcaggaactgcccgccgcgcgacgcctgctggccttggagcgcagcgacaccttcgccaaggcgatgaccgatggcgccaaggcagccggccaggccgtcgtaaaggtcgtgacacgccccggtgaaaccctcgccgccctgcccgccggcctcggtcaggcgctggtggcggcgggacgtcgtgtgcgcaacgtcgcgacctcgatcggcgatgccacgcgacgggacgacaccgcaccggcgcgaccggccgagcggcgcgatgacgctgcggcggtttacgacttcgcgaaggagctggccggcgtgaacaaagcccggcgcgcgatcgccaaggacctgggcatcgatccatacacgcgcaatccgctggtggccgagaagctcaccagcctcgcttgggccgccgtggccggcgggttctcgctggacctggcgctctccgctgtgccggacggcgcccgcgaaaccctcggcacggccgggcagctcaaccagctcgcgtgggagctgccgcccgccgatgtccgctaccagctcgaacagcgactgtcgcgccgcggccacgaaggcttcgtggcccgcgagctgctgcgcaatccggcgttctcgccgaccgaccagatcgccctcgtggaaacgttggaacgcatcggtgtagtcaccggcgagcgcgaagtgatcaccttggccaccggcctcccggacccgcaccacgcgcgcttcctgatcggccagctgcgaacgctggccgacgcggactcccgacaggcgatcgacgcctatggcatggccgatggtcttgtctggggcaagcaccgcgatggcagcgtgctggtggtgctgccggtcgaccacctgagctggac

SEQ ID NO: 120 - DNA, 10362 bp, Sphaerospermopsis sp. LEGE 00249
  LEGE00249_143
ggcatttttggtgtttttctttttcaacaatgtattttttcgctaatatgtgattttttaggctcagtttcctttcttatttccgtaatttctctatgtgccagatcagggtgcggaatgtgggttttaatgttaccaaatttgataggttataaaactatctattggtagataaaggtatgtcttatggtagaatctggctaaaattaggagatgagaagagctaaaatttgatgatgttttaattggatcatgttttaactatgaattcgcggttctgggtgcaaggttgctaatatttcactttccacaactgctaattcatcaagtctttgcatcactatttgtctgtcaaaataggtatctgctaaaacccaatatgtgccaaaatgtcgcgcttctgatgccattaaaccacgataaaatttagctaattctggttctggacagtttgctgctaaaagtcctaaacgttcatgactgcgtgcttctattaaaccagtcactaataaactatctaaaaatttttctggttctttttttctgacttgtgcttttaaacctgcaccatagggaggtggtgaaaggggtgcaaggagaatatttcgacgttctaaccattggttgacgagttcaaaatgttctagttcttctttggcgatcgcggttaattctctcaccagtttagtatttgaagggtaacgaaacataaaatttaacgctactcctgcggctttgcgttcacagtgggaatggtcgagtaaaataatatctaaattggcgatcgcttgttctatccaagcatcactggtaggttgtttgagagcgttgatagttggtaatggtgaacttagcacaattggtaatgggtaattggtaatgggtaagaaaattctacctattctattatacctaaatccgatttactaaagttgcactagcttgatcaactggcattaatatcacttcattaatattaacgtgagccggtcgggtagcacagaaaaatactacatcagctatatcatcagcagtcaaaggttgcattccttgatatacttttttcgctcgttctgtatccccatgaaagcgcacttgactaaattctgtttctaccattcctggatcaacggaagtcacccgtacaggagtacccaacaaatctaattttaatccttcggaaatagctttaactgcggcttttgtgccacaataaacgttaccaccgggataagtttgatgtcccgcaatagaaccgatattaattacatgacctttattccgttgtaccattccggggactatgtaacgggtaaggtagagtaaacctttgatattagtatctatcatttcctcccagtcttggcagtcgccttcatataatttatctaaaccgcgacttaaaccagcgttgttgattaaaatgtcaatttctgaccattcgggtggtaaattagcaatagcagattcaacggccgagcgatcgcatacatccaactgaagtaaatgagtttctataccatataatttattaagttcccgtgctttttcttccaacttttctaagcgtcgcgctgctaaaatcaattttgcattttcacgcccaaaaattttagcacaagcagcacctattccgctacttgcaccggttattaatatagtttgggtgttgagagcaatcatttttcacgcctcaaaaatactatcaaaaatttctcgctttactctaaaattaacattcctgatttgttggtactggtttaccagcctttgcatctacaatatctttaccatttggtaggacattttgcgctcttctctgcgcctcagcgtctctgcgtgagataaaaatccttcaacggagagggggagattcgaactcccggaagctttcacttcacctgatttcaagtcaggcgcattcgaccactctgccacctctccaaattatctgtcagcttgttaaacataaaaaccgacagataacagtatagcctataattacgccgttggcaatactaaagtagaagaattataaaaaatttctgccgataccacctggaagtcatcatctacccaaaccagggaagcttttgttaccacacccccctctaactcaaccagggaaaaattccgccgttttcccccattttctgagataattctgggtacattcgctgcatttaaataaatagttccctctggacttctaaatatagcttttcttaacaccttcttagtgtggcgcagatttcggtgcatatgaccaaaagccaccagagaaaccattttgttcagattgatactttgagaaatcgctgctgctaagtcaggatcaccaaagtcaccaccaataggatgccaatctttaccacaggggtcttcagggcgatcgcctaaccccgtcggtccattatgacccaaaaaaataatattctcacaagctgcacttttcaccgcttccacgattttatctgctgactcttccatactgctgacaccataccgttgtttacagatatcagcaaatctccactctgatccaccccaggtaaaaggacgactacccactactgttaaattccaatctggaaaatccaatttaccataaccgacttgggcagatcctaataaatctaattgttcctgtacccggtcttccttagtgcggtcataaggacattttttccgtccccattcagtggcagtgtaccatgcgtcgtggtttcccattaccgctgctttgggaatatccaaggaagcgatcgctctaaccacatccactgactcattaccaaaatctcccacaaacagcactaagtcaacacccagatgcttgagtgcgataccatcttctacttcccataggtcgtgaacatcgccaactacagcgattttcacaggttttgattgagttttctgactggtcatgccactttaaaaagccatatccatatatatatcaggataagaaactctaccccatttggaaataaattgggagcatcccaatgaaggaaaaaataaacgcaagctcactgaccaccacgctcagatactttgccgagcgtggttttgactcactcgattttatcataactttctgggcttaatggcttgtgcaggatttcctgcataaattgtcattgatgctaatgatttaacagctactccacccagagttaatacagcacctttaccgacagtcaccccagggccaattattgacttagcagcaatccaactaccttcctcaatataaattggggcaatttttaattcaaaatcagggtgattccagtcatgattacctgtgcaaagatagacatcttgagatatgcaagcatgactttctatggtaacatgagctaggttatctatccaagcattttcaccaatccagacataatcaccgacagtgaagcgccaaggaaattttacccgcacttttggttttaggcgcacaccttgaccaatagtagctccaaaaatgcggagtatttgcactttgaccgatgaaatgggtaaccaagaactttcaactagaggtgatcccaggaagtaccagcacagttgtttccaatagggtgcaccgggggtatagttacccagactatagttatctaatcgcatattcgtaatagacttctccgaaaaagatgtagggacaattcatgaattgtccctacgaatgggtttcaggttatgcttatttaattttcgggcaggtctaataggaaaacgaggatttccgcgccttaaatttcttcgggattaatccccatttcttgcagtctggcggctaatttagcggctttctcttcggcttgttcagccctttggcgttcttgttcagccctttggcgttcttgttcagtcctttggcgttcttgttctaataattcagaaccccaaagaaacaaattaccggattcatcccaccagcgcaaccaaaaggttaccatttctgcttttttacctctccatacacccaaaaacaggtttaaagttgctaggtaaaatcttccctgttcatctggggattgttgctggtatttaccgtctgttaaatgataaacatctaaggttccggtttgaggatgaaagatcacatatacagggacttttaaaatttgttcataaaaataccatttaccatagggataatggggattaatagaatattctcccccctcagtagcagagataaattccatcacaatggcggggggttctccttcggcttggggagtataactccggcgaacttctccctctgggagaggatgagctacaggtatataaacccagtcgggggctttgacgatggttttgtcgcccactgtggcgcatagcccaaaattggaagcaatgagcatggattctaagattaatccagccagttctaaggattctcgcaaagctgcggctaggaggggttggagattactttccactggttcgtctggtagggggaaatccgctggcagtttttcccatctcacagggggtaatgtgtataagggatggctttctataactgtcatggtgttaagcaatggctgttcatttattgtatcccctgtggataattatcgacatttccaggaaatcagcacatacttgtttatttagggtttgctgagaaagtctttccgtgagggcataggagtcaggagtcaggagtcaggagtcaggaggagatttgaaaatttctttgccatctcttgaaatccccaaaaatgcacactttttccggtatacccttccaaacccttgcactaatttctgtgtttatcagcctctaacctttgatatatcaaggttttaagtttattcagcaaaccttatttagggtttgctgaaaaagtcccttcgttgaggcagggaatagggaatagggaatagggaatagttttagctatctgttatccccagattttctaatttatcagacccaaaatgcacagtttttaaggtatacccttcaaaaatcttgcactttctttcctcctgatcagcctcaaacctttgatttacgagtattttgggtttattcagcaagccctatttatccctgtgattaaaactagcttctattaaatttatactgagcagaatttctgccaagactcgctgcaatgcgtaatacaaaccatatttaccatctaaaatgcctcctttgataatcaggcaataaaccagtataattagtggggcgatgatttttagcttacgcaagcgatcgcctaaactcagttcatggttcggggtttctaggagttttttggactcaatcaccatgtaacgttgttgcgcccataaccagcgatttaatggtttgcgatcgtcgtggtaaatgtatgctgtcagttgactagagttaccttttactaaaacccgatgagcgtgtccatcatcttgataatttgctttttctattctgtataatatctggcggggtgggagtagagtacctcttaaaggtttaccaaatacacaatatttaaatctggcaaagtagccgtcaatggtagtatctagaggtaaatttttaatctccgtaattagttcatcggttaagatataatcagcatccagagataaaacccattctgatttaacttgctgtaagccataattgcattgactggcaaaggaatcaaatttgcgtttaaatacggtgatttggggataagttgagagaatttctaaggtttgatctgtgctgtaactatcaatgacaataattgtttttgcccaggtgagtttttctagggtgcgctgaatgttgggggcttcgttataggtgaggatgaggggggtaatttgttctagcattgcggtaaatttaagctctccattgataagctgttgtgcagctaaactgtataattaaaaaacctgaagttacagtggcacaagcatcttgcttgtattcattattccagttaaaggcataacagcttatccaaacgggagtcagggaattaattaagagtctaaaagctaaagtcggttaaaaaccgactgagaaattatagtttcatggcggctatatgcttgctccagtgtggaagaacacagcattgatttccacaggtaaggtattccacctgcaaatttaaattcaatatttgaatacccttctgttgttaacaaattttctaatgttttcacagagaaaaacttgatatgtccaccatcccaaagagcagtgaagtgtttatccatttttccagagatagccagggctaagtttttcaaataaccatgatagggtgtagtcaaaattaaccgcccattgggtttgagtagttgtttagtattcctaactatagctttagggtcaaataaatgttcaattacctcgcaggaaataataagatcaaattgccctcctatttctgtatagggtaaatcatatatacttccctggataaaacgacaatcaggaaatttttcctgggctaattgcacacctgatttagactcttccactccgataacttcatacccttgttgtgcaattaaattagttaaactaccattgccacagccaatatctaaaatgcgtggttttggttgattttttagggggggggaagcagaatataccatttctaataaagaattaatcagatatttatgatggtgtccgctgtcagcattggtgtagtaatattcgtgtttattagacattaaatatttctcctttaaataatttttgttgttcatccacggcataaattccctagctaaaagctaaagtcggttaaaaaacgactggtttggtgtttggtgatgatggtgttttggtgtgggtggaggtttgtctaaatctgttgtttgttctaataatgaaattgtggttctgtttaaatgatggattttggctctcctagagtggttatgataatttcataaaaaataatgcttaaaccccttgatatacaaccaatccataaatacaaaacatcagatttaataaaactgattgtgattttattcaatctcttcaggacttacgcaaaagggaacgaaagtaggggtaattcatgaattacccctacgcaagaataaagttttcagtcacatcttgcgtaagtcctacttttgttatatcatgaatttaagcaactatttgtattaagttttcatatctagtacagcacggcgtaaataaaccaaccattctcaatcgctaaaaagcttacgacttattatttttgatttttgacttttgatttttgacttccgcgaagcggtactagtcggtttttaacagacttgagctttgagactcttaattcattccccggctccctggatatgcaaaaccgaatcaatgttagttagggtttgctgaataaacctaaaaccttgatatatcaaaggttagaggctgataaacacagaaattagtgcaagggttttgaagggtataccggaaaaagtgtgcattttttgggatttcaagagatggcaaagaaattttcaaatctccccctgactcctgactcctatgccctcacggaaagactttctcagcaaaccctagttaaacttagttaaattagtaagcatcgggattcaatcggaggaaatatgagtgaatcgacattgctaaacttagatcaatcgacaccagattcaaccccagattttgttaatccccccacccaggatgaattactatatgatgacggcatccctatggaaacctatcgccataaactgcaaatggacttactagttgatcccctagctgcttggttaggggatcaagatgcctttgtggggggtaatatgtttgtttactttagtccccatcaattgaaaaaccatgatttccgtggtccggatatgtttgctgtgttggatgttcccaagggagagcgcaaatgttgggtaacttgggaagagggtaaaggtccagatgtggtagtagagttgctatcctctagcactgctttcagagacaagacagacaaaaaagaaatataccaaaacaggctcagagtaccagaatacttttggtatgatccttttaatcccaatgagtttgctggtttcatcatcagggattatggatatgaaccaatcattcccgatgagcaaaacaggctgatcagtcaaaaattaggtttagctctagtgcgttgggcgggagaatttgggggagccaatgccgtctgggtgcgttgggcaactttagagggggttctactacctacagcccgtgaattagctcaacaagcacagcaagaagctcaacaggcacagcaagaagctcaacaggcacagcaagaagctcaacaggcacagcaagaagctcaacaggcacagcaagaagctcaacaggcacagcaagaagcccaacaagcacagcaagaagcccaacaagcacagcaagaagcccaacaagcacagcaagaagcccaacaggcacagcaaagagcagaggctgcggaattgttactggcacaggagcgccaacaaagggaggaattgctggcaaaattacagacaatggggataaatcctgatcaactttagaggctgttttataaattttcaagaggaaattagctagttatactaaaaacggatgattgctagacttttgttcaggcaaaaatctttggatagcaatactcttagcgatttaaatagtaaggctgtaacccgtttttagtatagtcatttgccaactttcactaacttaatgctatactttcctcatggcatacataccactggtgaaaagcggtcaaatttttgggattgcatccaacccaccttccgcacccttagctgtcacacaacgaaaaatggtcatttggggatttgagattggcgaactgcttgcagcagcgcttcgctatcgctacctaaactttagaccattttgtattaaaattatcctcaaaggtcttcaaaaatccgaaattaccgattgtgacactggggggtgcggaatgtgggataaaaccattaaaattcaaggcttccccctgccatcacaggggtaggttttttgcggaggtgcttcactttgatacatgattcattcgggtgcgatcgcccatttttgagaagcattgttatagaaatttcacagggacatcactaattttaatcaggaagaaattctggatcaagtagatcatcggcagaaaacggacaactttcaggaaaaagatgagcaggtaattcactttttttaatagcctgtcttctggctttaacataaatttctgcaatttcttgcaagaaatagttatacaacgttttagactttaacaataactcaagctcaaatcgaaagttatcaatttcattttgccaacctttggcacagtattctttttcagatttccaatacttatacaacaataagtaaatgagcaattgacgcaggtaactgtcaactttccgcctttgttcattacccaaactgagaatttcctcctttaaatgtaaaaaatctaattcctcaatgcgattattgtctagtaatttataagtttcttccagccaaaggaaataatcttgttcgtaaagaacattaattgtgttcatgacagcacctaagtattgtttactctattttgacgctccccgccttaaaaggctatccattataaacatctttcttaacaatcttaaaacctctacttggtaaaggtttcaagacttttgaatttacctgatcttgacaaaatgcacctcatctttattcataaaaacctcattttattgagaatcagcaagggaggattaagggttgggggtctgcaagcgatcgctctcatgaaattaagaaagatgtttataatggatagcttattaaggggagtaaggggggatctggataaaacctgatacttctcagacatcctctcaaaaacaatcattgttaattaccagttaattagggtttgctgaaaaagtctcttcgttaaggcagggaatagggaataggcaagagtttaggtgatctgttagtaaccaattctttgaaatttcacccggaaaatgcacgcttttaggagtatacccctgaaaaatcctgcactgatttcctaatttttcacccgaaacccttgatttatcaaggttttgagtttattcagcaagccctaattaaattctgatatccatattatgaataaagtaagcgggactttgagcgactttctgattaacaaaatttcgatttctaatgtatatatagcaatcctgagcagtttgtgagaaaatacggaaataagaaaaaagtaaatttgagaactggggtgtgggctacaaatgtggatacaattattagaggattttatcaaaaatagtcaagagccg

SEQ ID NO: 121 - DNA, 10079 bp, Sphaerospermopsis sp. LEGE 00249
  LEGE00249_148
ccagtccccagtccccagtccctagtccctaattctgcacatccacccaacgacgataaagcttttgaatttgttttaacagtgggttgtaaattggttgagtagaatcatgggatttactcaactcctccaatgtagtcaatagtttagcttcttcaatggctacttcaccatcactgtaaatcaatccactgatagcttcaatcagattttcacactcttctaaactggggcgatcgcccaaatattctctcacccattcataacattgatttggtttaactggtactaattcatacagccaaggcttaatctctgggtcagtagctaaacccttagcttgagctatttcccgcagatattgtctttcctccggctggattctaccatcaatccaagctgctccaatcagaattttaactagatttttaacatgagaattactaaccattgttgcctcctccagtagattcggtctttcatcaaatggtacaatccctagcagtattcactcggaatccttggtttttcttaaacgcaccatgaaaaaaccatccatatcttgttcatgaggccataccttcaaccacccagaggcagaaacatcaacaaaatcaaagctaggatgttcaatttgccaatgggaatttttttctaaaaagtttgtaattacttcttcattttcctctgggtgtaatgtacaagtagcataaactaaaactcctccaggcttgacaaaatttgcagtatgtgatatcaactcttgttggatttgggctaattcatggacagatgcgggagtttgtcgccaacgcgcatcagcgtgacggtgcatagttcccaaaccggaacaaggagcatctaataatacacggtcagcgatgttatgaaattgggtaaaagtgcgactatcccccgtgcagatttggatagattgtaaattcagacgtttggcattttcagtaagtttgcgtaaacgagaagcagttttatcacaagcgtaaattttgccctcatcccccattaactctgcaatatgggtagtttttccccctggtgctgcacaaacatcaatgatcacctcaccgggttggggatcaagcaaatgaccaactaactgggcgctactatcttgcacacaccaccaaccatcttgaaaacctggtaaattttgaattgcacccgtactactaattaatcttaacccttggggtaaatggggaattttcctcactaaaataccagcatctttaaaatttgattctacttgttctaagtcactcttaagaatattaactcttaaatcaatagtcggggtttgattcatccattgacagagtttttctgtttcctcaaaacctaattgttttaaccaaacttcaattatccaatcgggaaaactatataaaattcctaatctttctacaggattttctggtaattttaaaggttctgatgaagtttctgcaagtcgtaaatattgccgtaaaaacccattcacaaaacccgtcaaaccagaaaacccattggtttttgctagttctacagtggtgttgacagcagcagaaacagggattttttcctgataacgaagttgatataaacccagatgtaaaattgtccgtaggtctggtggttgttgtagtgctgatttcgtagccagttgattaataatagcgtctaaagtgcgttgtcttctcacacttccatagactaattctgtcattaatctacggttattgtcgggtagtttatacttttgtaatacacggtcgagggcgacatcagtataagctcctttgtgtacttctttgagggcgataaatgcaacttgacgggggttagacatggaaggtaatgagaatttgactcagagtagtcattatagctgtgaggatcagcccaaggagttgaaaacagattttttgaagtttgatagaaacgaaccacagagacacagagaaaccagttcattgggcggtttcccgacttgtagcaactagcgcgacacagaaaaaatagggtttgaggagattttgtgtaagttctgttttttaagacaacgaatgagcgatcgctttatttatgattaccctgtgtaagctaaatctcgtcatctactgttaagatagagtgtaggtgtgaatttctgccatattatcgctaaaatggacattaactcagtaattagtgcgatcgttagaattgcttctagtgctgctcccctagctatccagtcagcagaacgaagtgaaattgtgatcaaaattaaaaaggaattaggttttgatccgttacaaccgccaaaagatgctgttagcgtttacaattatgctttagttgagtatggagtgggtaaacctgagttggttctagaactttttagagaacaacaaattcaacaagctttttggaaaagttttagttccgatgattctttaatcttacatcaagaagtagaagattttctagattgcaatatcttgggagataaaatacgagagctagaatcaaaaaatatttcagaaaatattaacattcgtcaagaatttgaggaattttgtcaagtttttatcagagtagctgaacgcacgatgacacctgcggaagttttactttataaaattttcaagcaatcgagatatcgtgaaactcaaacatataaatatcccccaggatatcaaccattaattgaaacaaaaatccaatccttctgcggtcgcaaatttgtatttgaagcctttgcgaaattcgtgaacaccaatagaaaaggctattttacagttatcggtgatgcgggaatgggcaaaagtaccattgtagcaaaatatgtttctgacctgaaagcagtttgtttttttaacatcttatcagatagtcagaacactcctgatttatttcttaacagcattcgtgaacaactgattaatcgctaccaattagaaaatgttgaaaatgctgatttgtcaactttactggtgcaaactactgaaaaaattggcaatgataaaaaattaattatttttgttgatgcactagatgaagtcaaccaagaaccaggaccggaaaatattttatatttacccaaaaccctaccagatcatgtttatttcttcctgacacgacgacgctatgaacccggtaaaaaacgactttatacagaaggtgtaacacaagaagaattagatttgactgacaaaaagtatgatgcagaaaacgcaaaggatattcaagaatatattcgcttttgtttagaaaatgacccagaacataaaaacggcttacaaaattggattaccagtcaaagtatcaccattgaatctttcattaaagaattagccgcaaaaagtgaaaataattttatgtacttgcgctatgtgttaccagcaatagcagagggtaaatataatgattttaaattaacccaattaccacaagggttacaagattattatcaaactcattgggacaggatgaaaatgaatgattcatctaaagaaatgaaagtaatgattctgtttaccttagtggaaattgccacaccaattccctgtgagatgatttttaatattctccatcaagatgaatatgttgtacaggatgttttagatgaatggattgaatatttaagaacatcaaatatagatggagatatttgttacagtatctatcatgctagtttcttagatttcttgaaagcaaaaagagaactacaagcaacccgcaagttatttaaagaagtaaatcagcgcattgcggattatttagaacaggatgaggatgacaatgaaacaaattgaaaaaaaatcctctgcccaaaaattacataaacaaaaaattcgtctggctagatatccttatagtttggttaattctggtcagtatgaaaaatatttccaaaccctcacaaattatcaattcatatccgccaaaatcaatcatcctgactttggcatccaagcattaatagaagattatgatttactggatgatacccaaaccaaaacccacccagaccaaaccaaaaccttaaaatatattcaaagtgctttgcgactgtctgcacacatagtcacccaagacaaacaacaattacccagtcaattatggggaaggttacaagctatccacaccccagaaattcaaaccctattaaaccaagcacaaacaaaccaccctcacccttggttgcgtaccctcactcccagtctcacccaagcaggaggaagcttaatccgcactctctcaggtcatagtagttcggtatacgcagtagcagtcacagcagacaatcaacgggtgatttctggttcatctgacaatactgtcaaggtgtggaatttacagacggggaaggaactgttcacccttgaaggtcatagtagttcggtatacgcagtagcagtcacagcagacaatcaacgggtgatttctggttcatctgacaatactgtcaaggtgtggaatttacagaccggggaagtacagttcacccttgaaggtcatagtagttcggtatacgcagtcgcagtcacagcagacaatcaacgggtgatttctggttcatatgacaatactgtcaaggtgtggaatttacagacggggaaggaactgttcacccttgaaggtcatagtggttgggtatacgcagtcgcagtcacagcagacaatcaacgggtgatttctggttcatctgacaaaactgtcaaggtgtggaatttacagaccggggaagaacagttcacccttaaaggtcatagtggttgggtaaacgcagtcgcagtgacagcagacaatcaacgagtgatttctggttcatctgacaatactgtcaaggtgtggaatttacagaccggggaagaactgttcacctttaaaggtcatagtaattgggtaaacgcagtcgcagtcacagcagacaatcaacgagtgatttctggttcatatgacaaaactgtcaaggtgtggaatttacagaccggggaagaactgttcacccttaaaggtcatagtagttcggtaaacgcagtagcagtcacagcagacaatcaacgggtgatttctggttcatctgacaatactgtcaaggtgtggaatttacagaccgggaaggaactgttcacccttaaaggtcatagtagtagggtaaacgcagtagcagtcacagcagacaatcaacgggtgatttctggttcttgggacaatactgtcaaggtgtggaatttacagacggggaaggaactgttcacccttgaaggtcatagtagtagggtaaacgcagtcgcagtcacagcagacaatcaacgggtgatttctggttcatatgacaatactgtcaaggtgtggaatttacagacggggaaggaactgttcacccttgaaggtcatagtagtagggtaaacgcattcgcagtcacagcagacaatcaacgggtgatttctggttcatatgacaatactgtcaaggtgtggaatttacagactgaaaaaggattttttgcgtttattggtaattttataaatcgtattaaatcaaagttcacctttaaaggtcatagtgatagggtaaacgcagtagcagtgacagcagacaatcaacgggtgatttctggttcagatgacaatactgtcaaggtgtggaatttacagacgggggaagtacagttcacccttgaaggtcatagtagtagggtaaacgcagtcgcagtcacagcagacaatcaacgggtgatttctggttcatctgacaatactgtcaaggtgtggaatttacagaccgggaaggaactgttcacccttgaaggtcatagtgatagggtaaacgcagtcgcagtcacagcagacaatcaacgggtgatttctggttcttgggacaatactgtcaaggtgtggaatttacagaccggggaagaactgttcacctttaaaggtcatagtagtttggtaaacgcagtcgcagtcacagcagacaatcaacgggtgatttctggttcttgggacaatactgtcaaggtgtggaatttacagaccggggaagaaatagctactttcacaggtgacagtgactttctttcctgtgcggttgcacttcccaatcaattcacagatacgttaacaattgtcgcgggtgacgttgggggaatggtgcattttctaaagttggaaaatgggggagaataaatttatgaactccacccccagaccaccaacggttaataattacctggatactcagcaacaattcacggacattattaacgccaaaagcacgaattttatcggtcgtgagtttgtttttactgagattaataattttctcaaccgctataaccggggttatttcacaattatcggcccaccgggtagcggtaaaagtgccataattgctaaatatgctcaaaaaaattctcccaaaaattaccaagtgatttattacaacgcggagttagaggagaaaaatcacgctgcggaatttttaatatatatatgttgtcaaattatcgccaagtttcaaaatctatccctgccaaatttaccggataacgctacagaaggaagttggtttttatcattgttactacaacaaatcagcgaaaatttacaattacatcaaccaaaccaaccaaaccaaccaaaccaaccaaaccaaaaattaattattgccattgacgggttaaactgcatcaaccgcaacttacaaccaccaggaacaaatattttttatcttccccgctacctcccccaaggagtgtattttctccttacccgtcgtccgtttttatcaagtaattctggtttattaattgaagcaccagtacaaagtttgaatttagcagattatccacaggaaaataaacaagatatacaaaattatattcaaacaaccctaaattctcccccctttttaacgggggttgggggggatctaaaatcttggttaaatacccacaaaatcaccgaaaaagccaataattttcaatacatcagcgcaatcttcaccgctattgctgacggtttctatacccaaacccaacaaatacaaacatcattcccaccagcattagaaacctactatcaacaacatttagccaaaatgctagattgggaaaatcaagatttacccctagctgttttgcaagtcttagccgaagaaacacaacttatatcagttacagatattgctaatttattagatactgatgaatttgatgtagaggaaattttagaagcttggtttgagtttttaaatgtagaaattaaatctaatgtttctgtttacagtttatatcatgataatttctgccaatggctgaaaggatatctcagaagtatccaaattaatcgagatccccccttacctcccttattaaggggggaaattaatcaaagtcccctttttggggattgagggggatctacaaataaaggtgggtaacacagacgctaacccaccctacgatttataaattcatcaaagaatctatactacccacttcaaactcacaagccctagaaattgtttctgggggtaatttatcaaaactaactaatggcaagaaatcaggattatctatgagttctttccctaataaatatcctgctattgtccaagtttgatatttccgcgcttgtttaccaattaatctaccttttttaccatcgtaatattctggccattcatcttcactcaatcgcgctttagcaatttctattgcttttctagccataccagttttattagttttcactgctgctgcggctaacatccacattaaaacaggccaacttccggcattatgataggaccaaggtatatttttcggatcgcatcctgtcaccactctatattcttcattctctaaagctgggaaacagattttcatcggcatatctcctaccaaatcatcccatcttttttcaattaaattcataattgcttgtgactgttcttctgtggataaatcacaaatcacagccattaaatttcccagggtaaaaaagcgagtatctaattgagatggtccgacattaccagcaaaataaccgccttttttcggtagccatttatctagttcatagtaaggcaaggaatcagcataaatattaaataaattcaccgctgttttcccatattcttcacttttaaagcgataaatggcattcaaacgattcagatctatccagtagtgtttgcgaatatgtccacataacaaaggtaatctattatcaattgcttcaacaatatcttgattaccttgacaaattaataactcacgggctacacgcaaagccgcaaaaaatagcacttgaatttctaaaggatgtccataaattcccatgcgtctatcaatcatacacgcaccatcaggaactaataatgtcgggtacatatcaaaacgatttgccaaacagatttccataattaaccggatacctgtttgaaattccggttgataagctagagtataatcattagtagcgactacataggcacgtaataaaatcaaccaccataaacaagaatcaacaggtgtgactctagcgatcgcgtgttctccaaaatcagcttctaaatgttcttccccattaatagtcacaactttaaagctggctggaattaaacccctacccggtttataagcatccaacgccttttctttaggctgtaactttaacgtttcttccaaaaagtttttgacaatatcggttctacctttaatcagaaaaatcaacgctgaagaaacaaaatctctaatgaaacattggtcataattcaatgcttctacggatggatcataagccgctaaagtaccaacaggacgaccttgatagtaaagtattgaattttctagtgcctgccacgcctctttttctatagtttcacttgtagttttacttgtggttaattcatttagttgcatcgccagaataactccattaagatagtgaatttgtggtgaatgcggctttatttctcatgagtatttgctatgttcagcaaaatataacttgagcaatagcaaataacattccttaatagcaatcctcaaacaaaatcagttacaattactgattatcagcaaattaattaggtcataattaggggttgctgagaaagtctttccgtgagggcataggagtcaggagtcaggagtcaggagtcaggagtcaggagtcaggagtcaggagtcaggagaagatttgaaaatttctttgccatctcttgaaatcccaaaaaatgcacactttttcccttctccctgacgattaatgaatcggtgttctagctattcacatcaaacaatacaaaaaatattcatcagaaaaattacagcaaaatatacaagatatattttgagattccgcattatcccatgagaaaatctaggatagtgcttttacaaacaaaaacataccccccatgctgttttaggatcgtaataatgaagtttcaaccccttacagtatatttacttgacaatgattgactgtttgcaactgctggttaaattattcccctttaacttaacaatttataacgttttttcccaatatgcaatatagatcattaaaaaatttaaaatgtcaattttctggaaaatttcgacattataacccaatcatcaaaccaaatcacaaataactaggggttgctgagaaagtctttccgtgagggcataggagtcaggagtcaggagtcaggagtcaggaggagatttgaaaatttctttgccatctcttgaaatcccaaaaattgagaattatctaataagctgttacacagctaaattgtataatcctaatattctgaactcttgtgtaacaggcaagatgcctgttccacttatacaaattaaatgcacaacagcttactttaaaaactccataagtaggggttgctgagaaagtctttccgtgagggcataggagtcaggagtcaggagtcaggagtcaggagtcaggaggagatttgaaaatttctttgccatctcttgaaatccccaaaaatgcacactttttccggtatacccttcaaaacccttgcactaatttctgtgtttatcagcctctaacctttg

SEQ ID NO: 122 - DNA, 9450 bp, Sphaerospermopsis sp. LEGE 00249
  LEGE00249_158
ggactggggactggggactgggtaatcattttatttttcccaattaccaattacgaattaccaattacgaattaccaattacgaattaccaattacgaattaccaattacgaattaccaattaccaattacccattacccattaccaattacccattacccattaccaattaccaattacccattaattttgagtagtaattaattctagttcaattctatcttcatcaggttgtgtaattttcacctcaacattaggagcaaagtatttagtcattttctcatgtttttgtagccaaatatcaagaggaataaaaggcgaatcaaattctaaaatcaaggaataagcaccgttaatttctatttctcttaaaccagtcactactggacgttcttcatcgttaggattcaaacctaagtatgttaacgcccggtctaaatgagcttcttgtccgtagcaaaatctagttatgtcagtgcggattttattttgagttacagtagcttgttgttttctgagtgctaatactgattctgtggtaggttggctaaagggtatgggcttgagttcattagctttgagtgctaaacctcccagcaagagaggaaagccataaaaaaagcccaccaagttgagagtcgcgttatcagcagcataagcgacgaaaccgacaatggttaatatgctacccaaggttaaaccgagtgttcccaaagaaattttgcccagcatgatttgaaatgttgatcatttcttaacatcttacccagatccacgacttctttgagaagtcagcgatctattcttgattgatcagctttagccgattttgcgttaagtttaatgaagaataggtaagataggaataaaacaatggatctacaaacacttaaagaacgaattgcctcagttcaaagtaaacgtgaatacttgctgagtcttctggaacaaccaaatttaggcactttgagagttgatgtaaatcaagctttagaagaattagatgatttaattgatgaatttagacgcaatattcccgaatcagaaactaattaatctaaaataagcaaaatcaaaatatacgtcggcaaccgtaattttccggtacagccgacaatcttgatttttctaaaaaaatcttcactaacccatcactgaattgttgatagcacgctggcctagttgtctaaccaaagcgatgagttctgttgtgggtacatcttttttgcaaacttcatcaaaactgggtattgcctttgtttgttgcaagtgtgcatcatctattgatgaataagccaggatttgagtatttggagatatagatttaatataaccggaagcacgccaaccatccataactggcatatgtaaatctagcacaattacgtcagggtgggaacttttgaccatttctatagcctcttgaccattactagctaaacctacaacttgcatattctcttgagcagaaaaagcgaactgtagggttaaacgagttagttcatgatcatcaaccaatagaacgcgcaaggaaaaagactcacaggacaacattaccattcccggaaactgaaaattatatacaagagtatctatagtttatgggagtaagtgcctgtcttaactctatcctacggatgaataacgggtgtttgtgtataaagaaatgattaagttttgcggtaggagtcgggagttattaattttggattttggattttggattttggattttggattgtttttgttacagcaattttggagtaaatgaggtataccaattttggaggatagttttaaaacttgaagttcaatcggttactgtacctcatcaacctcgaaactgctgtatctcccatctaaaatctaaaatctaaaatctaaaatctaaaattgtcttccccagtcaccagtccctgtttatgtggtgtgtgtagaacgtaaagccatagacatgagaattttttgagaattagcttcttgagaatcatcatagggtcgtctttggatataagtaccatcagcttgtaaatcccaagcttgacgattatctgctaacataattcccagaatttcttgcaaatctttagcaatttctggatctctaataggtgtgataacttcgactcgacgatctaaattacgacgcatccagtcagcactgccgatatatatttcttcttgattattgttgtagaagtaaaaaatgcgggagtgttctaaaaagcgaccgataatgctgataatgcgaatattttcactgatgtctttgagtcctggacgcaagcaacatataccccggactatcaaatcaatttgtacgccagcacgggaagcattgtatagggcagtaataatttccggatcgacgagggaattcattttagcaacaatgcgcccggaaaatccattttggacattttccatttctcggttaattagttcgagaaagcgatcgcgcatattcacaggtgcaactaatatttctcgataggttttttggcgagaatatcctgttaagaagttaaacacatctgttaaatcagcgcccaattcttcccgacaactcaacaatcccaaatctgtatatagtcgtgctgtttttgggttgtaatttcctgtcccaatatgtacataacgacgcatccgagctttttctcggcgcactaccatgacaattttgctatgggtttttagaccgactaaaccataaacaacgtgaacaccaactctttctaaacgtctagcccagtaaatattattttcctcatcaaaccgggcttttaattctactaatacagaaacttgtttaccattttctgcggcggcaattaaagcattaacaataggtgaatccccggaagtccggtaaagcgtcattttgatagctaatacttgagggtcccaggcagcatgggtaataaaacgctccactgtgccggaaaatgattgatagggatgatgtaccagtaagtctttttcccgaattaccgcaaaaaaatcttttccttcttctacgtctaatacatctgggtctatactgggttctctgaggcgttgcaagcgggaaggaacaacggactgacgtgggggatctttcagttctggcaatggtaaagccataaaatacattaagtctcgcagtcctaataaaccatctacggcataaacgtcattttcgcttaattccaaatcttgcaataaccgagaacgtaaaacttctggtgtttgggattgaatttctagcctaactggtgttccccccatacgacgtttacgcaattcttgttcaatagctaataataaatcatcggcttcgtcttcttcgagttctagatcagcatcccgtgtaatgcggaaggggtgatattcctgaatattcatccctggaaacaggtattctagattgtgggcgatcgcctgttccaatggtacaccgatccagttagcggtttttccgttgttgtcaattcctaactctgatggtaaaggtataaatcgcggtaaaacattaggaactttaactctggcaaaaaattcttcttctgtttctgggtttttcaccaccacagctaaatttaagctgagattagaaatgtagggaaaaggatgactaggatcaactgctaaaggagtcagtacgggaaagatttgttctttaaagtagttatctaaataatttcgctgtttttcattcatttctatatatttcagaatatgaataccatgattagctaacagcggttgtaaaacttgttcaaattgttcgttctgtttttttaccaacgggttcaggtgcaacctaatttcatctagttgttgttcgggtgtccgtccatcaggagttaaggagtttactttagcgtctacctgttgctttaatgctgcaactcgcaccataaagaactcatctaagttagaactaaaaatagccaaaaatttcaaccgttccagtagtggggtgcgctgatcacaagcctcgtgtaatactctactattaaactctaaccagcttaattcgcggttgatatagtattttgaatcattcaggttaatgctaggggcagtctttttagattttggcataattgattacgggctagtagatgtcacgcagaaggcacgaggtaagaggtaagagttaatatttagatgtagtagttaattaatctaactaatatattaatttttggttaagagatatttaaaaatggggaaatatagaagttgtaagttggacgaaaacaaactgttctattccctattccctattccctattccctattccctattccctattccctagtgtaatgtttcaagctactcgtcgccgtcttgctctttggtacactgctgttactgctatcttactactcttgtttgccactggggtatatttatatgtccgcagcactctgatagaaagaattgatgataccctaaatcatgtggtggaagtggtagagcgttctttagtcattgagcctgttaatgtacaacctgatgaactccgtgtcaatgtagaagcgagttttcggaataatgctgatacagcggaagatgatcatattgacctagaatggtttagtcccactggtgaattacggtggtcaactttttccgaagctttaaatattcctattcatagcaataccggtgaaactgtgcgagtggtggggatggggggatggggagactcagaactgttattgcgacaagttacccatcgggtagaggtgggaagacaggttttaggttatctgcgtgtgagtcatccttggtttgaagtgactaaacccagtcgtcagttaatttttgatttgggtttgggtactgggttgatggtgctttcggtagctgctagtggttggtttttgtctggtaaagcgatggaacctgtgggggagtcttaccaacggttaaaacaatttacagctgatgcttcccatgaactcagaagtccgatcgctttaattcaaactaatgtacaagtggcgttggctgatttagacttagaatctagtagtatttctcattatcgtcaacagttaaaattagtagaaagattaactcagcgtttgggtaggttggtgaatgatttattatttcttgcacgacaagatagtggtattggtgcagttttattttcaccttgtcctgtggatgctttgttaatagaagtggtggaagaacaacaacttttagctacagacaaggaaatttatctaactttgaatttagttgatccgccaggggaaattgacccagaattacaggaaaattggtttactgtgatgggtaactgggatgaactggtaaggttatttacaaatttaattggtaatgctttgcaatatactccaactcaaggaaaggtacaggtggagttagggcgagttgcgggaatgcgttatggttttacttgtttacaaattaaaatcagtgatacgggaattggtattcctagtgagtctttaccacgattgtttgatagattttatcgtgtagatccagcgcgttctcatcaaagtcgggaaataagggaaaatagcactagctcaggtttgggtttagcgatcgctcaagctattgtggaacatcatcaaggacaaattcaagtggaaagtgttgttggtaaaggtactacttttattgtcactttacccatctctctggagtattaaatataattcagtaggggcaaaccccctgtggttgccctcaagagtcggtagaagtcggggatctggatattaggtatgacattttttacggttgagttacttatttatgcaacatttgtttcttgtgatagatgaagaaagctagttgcataatttaatatgagaatagcatttaccaagctagtgaggtacaaagttttttatgttagggaattgggaattgagaattgagaattgagaattgagaacagtaaataaattagagtgtacctcatgagactgggaaacgctatatctataggaataatatttgaattttgaacaaaaatccgtacacatcactaattaaattttgaattttgatttcattgatagattggaatgtctattaatattgattaaaaattggttatatatagaatataggaggattaaatgccaatttatatcagagaagatgtcacttacaatttactcaaaaaaatcaacgaaactggtcagggaatgcacgaaatacattttaatcaagatgattttcctggacatagaatcacaatttctgactttttaggacatttagattatttaaatcaaaagcattatatcaatgctgagtttacaggtaatgcttacgcaactcaagaagatgttcctgatttaattcatccccaggaatttgatttgcgaattgctaatactctgggcgcaccggatggaccattaccacatttgattactttcaaaaaagcagaaatgacggaaaaaggtcagaaactattagagaaattagaagataataaaccaaaagtatcaaatggaaaaccagcagttgctattgctgataaaaatctaccttttttagaaaaggtgatggttaaaagtggggtgacagatatttttgatgcaagagatttaacagaagttgtatttcgggtaatgcgggatttaatgaatactgaaactgctgacagagtagaagtagaactgcatgaaccagcagaaataactaaagataaatccctgcaattagaaattgctgatttatggcatgatacaaatccaattgtggcatttttaagccgcatacgtccacctttacaaccgataggaatgtttaaaggaattgatagcgatcgctttttatttagagttgcaaatgaaggtggaatgccaccaaatgtagaagtagaacaagtaattaaagctgtattttctgccacaaaagacgaattatcaccagaaataattcaagaaatttccatctggttgcctgataaaattcgccaactttgggaagaaggttaagaaggtgacagggaacaggtgagaggtgacagtgtaagagggaagaggggatataaatctacaatctacaatctacaatctacaatctacaatccaaaatccaaaatccaaaatccaaaatccaaaatccaaaattaataactcctgcctccagactccttacaaattaccgtcctttgagttcgttaagactattgagtaattttgcttcttgtttgatgtcatctaattttcgtgctagagaaagtgcctgttgataaaaattgcgtgcttggggataattccgcattttttcataaagttcaccagaggatactaaagattttaattcttccctgggactattcaagaatttagcgatcgcaaatctttgttctagcaattccaaagcccgttcataacggccaacagcagtatgagcagtgactaaaccatcaattgctcgtaattcgtcagggcggacaaaattgatttttgctaaccgcattgctgtgccataactggcgatggtattttgataatctcctgcgaaaagataggcatcacctaaattattcagggtgttaatttcaccaattacatctcctgttttgcgacgaaaaattaaagcagtttccgctaatttaattgctctgttataatctcctaatcttgtgtatacaagacttaaattactgagtgaaagtccttgtccttcaatattttcgagattacgagccataacaagtgcatcttgaatagtttgtcctgcggtttttggttcgcctttttgcaggaacaaagtaccaagattattaagtgcaaaaatctgattgtgaaaatcctgattatcacgagctatacccaagcgacgacggatagcatcttcagcacctttgagattacctaattgcagataagcaccagcgagtaaatcataagttactccctgggatttcatatcaccaagagagtgatatatttctaatgcctgtaatcccgattcaatagttttttccacaaaaccagaagcatattgttgtttacctaaccgcagtaatctatcagctttttctcgaataggcttaacatttaaggatctgccaataggatgatttaaaggactatgaagttgtttggtaatctcaatagcctttgcctgttgaggaatgagaacagcaatagataatatacctaataaagcgtaaatattcccatgtttccatttactaatttgttgtaaaaacagggaagaattgaaattgccaaggctatgccctgataaaaaatgccgttgttccataaaacttaaccgtgaaatttcggctgtaaatagtttgtaaataaaatgattcaacaaaaagtttgatttttatagccgtagacagaatagttaggacatcaattgatcatgaaagtctgactacaataggatctcactcctgacttctgactcctgctataattcctgctataattgcagaatagctgctgttgtattgatacataagttaagtttaagcaatatcttcacctaagtaaatagcgcgaatatcagctggtaatttgtcttctagcatacgataaccttcttgaagcaaattggctacttgttgaggataaattttttcaccttcagcttgtaagtaagcagaaatgcgagtttcactccaatggaaagtttgcgccattaagacaattaagcgcaataatggcggtacttgatctaatgcctgttctatataacaccataacgggggtgacgtgtctttaagtgaataatgaatagcctccgttggtggtagtttcatttcattaatacaaaaagctgtaatgttgattaaccagttttgcagagttaatacttcttcccctgtttctgggttagttaaatatagtccaccgagttcataatatatatgtcgccaagtcagcgcaaatagataatctgcctggacaggcgatcgcgccgaatgttgaatcaaagtatagactatagggctataacggcaaaaaatagcagtaaagtatttgccatgatcaggatagcgcctcaacaaagtcagcagttcttgatcactgtgatgaaacagcgacttcaccagcggatggttagcttcaggaaaggatggtatttgcacaagcgttttagtaaatggttgttaaaatatacatagtcaaggtgagtaatcagtcatgggtaattggtgattggtgattggtgattgggaaaaatgaaattgtagaacttacacgcaagccatagaataaactaaccacagagctacagagaacacagagaactaagggtttgagagatagatattttgcataatttttggattgattcctagtccccagtccccagtccccagtcaccagtccctagtcaccatatttaccagtgatacccattgtgtaacactgaggtcttcggcgcgagattggggattaatatttaattgttccagtaattgcgtc

SEQ ID NO: 123 - DNA, 9400 bp, Sphaerospermopsis sp. LEGE 00249
  LEGE00249_159
tctcttgaaatcccaaaaaatgcacactttttccggtatacccttcaaaacccttgcactaatttctgtgtttatcagcctctaacctttgatatatcaaggttttaggtttattcagcaaaccctaccctggctaatcataaataaaggacaggcaggatgcctatcccacaagataggataatttatcccattacccattaccaattacccattacccattaccaaactataaccaatctcgataagcagagatttcatttacgccaatttcaaagggcattcctttaccaaaaggcggataaactctaacttttgcttctttggtaaatggttctaaacttttaccaaattggggaatattgctgactatatgccagtaagatactatatcaggagcgtcaataattaataacagagcattaccgtttttggtgatataccaatgacagttagatagcaagacttgggtaatgcgatcgcaagcgtaataaaagcatctgccaatagattgctctaattccatttgtaacattccgtcctgttttgtcacctctacgggaggtaaatcatcaggaggaagtaacggcagtttagacataatttcgcacctcttgattgtaacgctgcaaactctcaagattttttacagaaataaagatgagggtttgagtgctattgtgctgatattttattcgtcctggaatttcttgattttgtcgcggcaggtttgaacatccccaattatccaattttccagcaaataatctatttcataacagatatttgtttgataataggattgttggggatggggactattctgcattacttgagtcgagttagctatggttttctggctaaatttatggatgaaaggtaaggctttatttaccgcttcatcatcagttttagtcacaaaaaagaaccgcgctaacagaaattgatctgcaccactgttattgatttgtcgatatctgatgacagtatttctcaatctcaaaagagaaaaaggtggaatcctcattaaactaaaagaatcgtcaccagcatatttaactacatcatcatcactagcgatattgcagaaaagtcctattttcatgattggctatattctagaccgccactaaatgcaaatccaaccataaacgcggttccgactgtcttaatttagatagtggatcgcggagtaatcttttagcatttatgcaaactacctgaataagtcccatattttctgctacttctctcaatatttctttttgtgattgtactaatggcatgatgtcatcagaacaataaattcctatatattgaaagcgtctagcaggtcttccccaaaaagaggtgataactttcacatggcaattttccaatatttccccaaggtcagggtaataatggtctaagattcgtgtgaattcttgagctaggatatcttcagtaatcatttgactgatatttctgattgatatttctgtagcgtctattactactatttagtataacataatcttgttatttaaacatgacaatttagcaggtttttctaaataaaatattaatttctagtagtcaggagtcagggagaaattatttgtattttcccagtcaccagtcaccaatcaccaatcaccagtcaccaatcaccaatcaccaatcaccaatcaccagtcaccaatcaccaatcaccaatcaccaatcacaaaaagaggtgaactttaaaaaagcatcacctctaatataatgaccatttataattaattcaaaattactgaactgtatagcacaaataaattttgaactaagtcctgtatttatcaaacattctgactcctgaattcttaccttatcgggaattgcgttcagcgactaaaacatcagcgagaatatttggtagatttttcaaatccatatatccttcagaaccagagataggagacataaatgtataatttgggtcacaggctcctgtatcataaacttggataaaccatttatcaggaaaaccttccacacccaattctacaatgtaccaatattcacccattaattgcgagttaatgatagtaaaccaatctctgtattcttccgcaatgttccagtctgctaacagaaattctaaagctatttttcctgcatcagttgaagtcaatagcattattactcctgagttgcaacctcattggaaacatcaggatataaacctaattgtttcgctaattctttagctataaaaaataaaaattgagcgccatcttgattaccttcatgggcaaacatagtcgcaacttgtagcattgtgtgtatcaaaccagaatcaactaattcgggttgagcttccaatacctctggttcttgtccattaggacatctgagtaattcatcaatcaaattaaaatactgagtttggcgttcttctgacatggtaatttactttatggtgaacaagaaacttgaaaattattgctttattttcaggattcagatacagtattgacaattaatgagagttttcgagtcatgattgataattgatgaaaaacttgcttgaagtatatccctcataaaaacaatattctgactcctgactcctgactcctgactcctgactccttacgatttattgttcaatactttgttgccaaagtctttctaacatttctacttgcgctttgaaaacagcagcacgataaacaagatatctatcgtaagcaatgattcccaaaccaatacaaataggtgtagctaaaaccaaccattgcaaaattgtgacgattttatattgttcaacaatcatttgcagttggagaaaaaaattatttgcaggtatttttttttgagttagagattccagagtatttacactctgatttgagaaagaaaaagaagcataaccttgattaattttcgttaattcacaagataaattctgtgtcttaactaactctagatgtcgtccccaaattaaattaaaaactattattcccggagaaagtacagctaaagtaaccaaaccaactgtcagcacattgaaaatttttaatttcatgtttgctctacctcgctaggttacaattacccagtaataaaatctaattaaaggtaatttatgggttattgctgcaccttctgattgccatttctcaaacagctatcacattttagatttgatgtagtaattttagattcaaaatataaaattggtagataatacctaatatttaaatttttgctgtgaatctaaaatctaaaatctaaaatttaaacccagcagtttgatcagttacaaatgtaaatagcgaatctcataaatgttgatcaagcaattgaaattaaaaattcataaaaaatccgaatccactcctaaaatatgctagatttagtaatcaataatactgacagaatttaaccgcttgtgaatagagattaccatttaattatggttaagaagtcccccctagttcaccagacttgcgtctaggaatttcggggggtagaggggaatctctgcgtaaatcctataaatgtttatatcagttgcctccccagcacacagtttaccccaccagaattgaaattattaaaatcattaaagttgtactcaaaggctgtaagtcttatctagtaagaattataaaaatttttgagggtagaggtgctagatttttgcagagggggtactagcatttatcaggtggggtgcggggatttttgtactcaactgtaaagctttatgggcaaatacttgaggatatttaaagatgatttttaatgatgaactctgtactcaaataacagtatatcatgacaaattggaactgaattaaaaataaactaaagaaatcaaaaaagcaattaaaattttgccaattaaaattttaccaattaaaattttggcaaaatatttttggattttgatcaagtcaggaattacaaggaaattatgttgatagataaaattcttaaaataaatgttactcaactatcaaaaaaatatctaaaaaccgagtatgatgaataaagagatagaatgattattgataattttaggataattttaggataatcttaggataatctgaggataattttaggggttaataaatgcgaattgctaaaaacgtaacagaacttattggtagaacgcccttagtacaactcaacaaaattcctcagtctgagggagtagtagccagagtagttgttaagctagaaggtatgaatccagcagcatctgttaaagatagaattgctgtaagtatggtaatttcagcagaagcagagggcttaattacaccaggaaaaactattttagtagaaccaacttcaggaaatacaggcattggtttagcaatggtagcagccgcccgtggttacaaattaatattaaccatgccagaaaccatgagccaagaaagacgcgccatgttgcgtgcttatggtgctaatttagaattaacacctggtactgaaggaatgcggggagcaattaataaagcagaggaaatagtagcaaatactcccaatgcttttatgttgcaacaattccgcaacccagctaacccaaaaattcacagagaaaccaccgctgaagaaatttggactgatacagatggggaagttgatatcttaattgctggagtaggaactgggggaactattaccggaatagcggaagttattaaacaaagaaaaccgaattttcaagttattgctgttgaacctagtaaaagtcctgtgctttctggtggtaaatctggttctcataaaattcaaggtattggtgctggttttattcccgatgttttgcgtccagaattaattgatgaagtggttcaagttgatgatgaagatgcaatgaaatatggacgcaaattagcaacagaagaagggttattatcaggtatatcttctggtgcggctttgtgtgcagcaattaaaatcggtaaacgtccagaaaatgcaggtaaattaatagtgatgattcagccttcttttggggagcgttatttaagtacagcgatgtttcaagatttgatgagttaaatattcgtaaatattctgtaggttgggttgagttttttgtctgaatcaggatttccaggattaaaggattcacaggattatgtagggtttgctgagaaagtctttccgtgagggcataggagtcaggagtcaggagtcaggaggagatttgaaaatttctttgccatctcttgaaatcccaaaaaatgcacactttttccggtatacccttcaaaacccttgcactaatttctgtgtttatcagcctctaacctttgatatatcaaggttttaggtttattcagcaaaccctatgtaatttaaattgatacagcaggaatcaggagtcaggagtaaaactctgtttctgtctaggtttcaagttatattctgtacctgattaatctgcaatctgctgtaattaatataataattgataaatatagatttcaggtattaatattaattactgtcagttagataaattcattttgctgttgaagatgctgcaaataattaatgattcaatattcacaacactaatctttcctcagatatctgatttatcctgcatcttcatgactaaaatcttataaattatgataaaaacaaaaatcctgcaaatcctgattcagacaaaaatatcatatatagtataaaatacatctataatatagatgacatcctttttggtaatttacattaggcgtatgaatacaacattgaaagaatttttggaagcttgcgaaaatttaggaactttgcgtttaatagtcactagcagcgccgcagtattagaagctagaggaaaaatagaaaaactattttatgcagaattaccaaaaggtaaatatgcgaatatgcacaccgaaggatttgaatttcatttgaatatggataaaatcactaaggtaaaatttgaaacaggtgaagctaaaagaggtaattttacaacctatgctatccggtttttagatgaaaaagaagaacctgcattaagcctatttttacaatggggtaaacccggagaatatgaagcgggacaggtagaaaattggttggctttacgggagaaatacggtgaagtttggcaacctttacccctagaaagtttgtaatttttgcaattgattgattcaatcaatcgtttatctgcatcaaaattcataagtaggggtttagcagtgctaaatccttacaggattaacatcagattaatgttggaaattaatgttggcaattaatgttagaaatttaaattgatttttttgagttgttgattatgttcctgaaaaccattttaagtctttgtttaatcatcctctgtttatttaccaatgcagaagctaaagcaggtgaattatctgaaaaattagccaactttacacaatgggaaaaattaacatcagtcaaacccgcaaagggagatttagtttaccctgactggatagctggaacttggaatgtcaccagtaccttggtagatttagctgcacctttagcaccagatattatcacaccaggatttgaagcaaatcgcagtcaattaaatcaacctgtgaattttgtagtgagatttgtgaaagttacaccacacaattcagattttaatcttttctttaaaacaaatcaacaatcacaaaatcaacaatcaccaattttagtagctgatcgagtatttaacagtttgaacttatccagagcttatttaggagatgatgctgtattagcagttaaattagatccagaatctcctaatcgtcaaattaccttttttcgtggcgatcgccaattagtttctgtagtcaccgcacgcacaaccgaaaaaaatcccgatggtaaatttggtaaatttggtaaatttatcagtgcagaagtttttcaacaatattttaaaggtggttctcgtgcctattttaacaatgtagaatctaccacagcttatcatttagtttccacatctgatcccaaattatacccaacaatagaagcagatcaagtcactgctgtgtacctttcaccccaagatcctgattattttaccgcaggttctcgtccggtggcgctttatcgttatcggttggaattttaccccttaaaatagccaaaaaattgtcaatgcaccaagaaggcattgatcaccgcttacactccctgcaagaaacaggttaactcaggggttaatcatctgaaacccttgtgatttaagcctttccggtttttttgaaaaaaagttttcccaaccccttgccaaacctaaaaactgctgctactataggaaaagtggaacgaagcgggtcggtgtccgagtggttaatggagacggactgtaaatccgttggtttgcgcctacgctggttcaaatccagcccggcccaccactttgagatgatatgggttacaatagctgagtgtcgagttaaattctcagctttgtaattcataaatcatcaaaaacccgaaaagtaaatttcaattttgcccgtgtggctcagtggtagagcacacccttggtaagggtgaggtcacgagttcaatcctcgtcacgggcttgttttaaaactattaatatatattaacatataaggtttttaggctattccctaaagactatcaaacatctataaaacatattctatcccaaaattgccccaaaaaataaaaaaaaatgaaccccttaactcttgtgtcatggtaagctgttacacagctaaattgtataatcctaatattctgaactcttgtttaacaggcaagatgcctgttccacttatacaaattaaatgcacaacagcttaaaactcagctttttctgcaaaattctgttcattctgaaaatctggaaatcctgattgagacactgtgctgctttataccagaaaacaagtttctcaaaatgaaacccagaactcatcacacctaacgcctaactcgtacaatagaaaatagattgttgcgaaatgtatagttaggatttattgctgtcatggcctcagcagttttaatcgaaaatctaaaaaaaagctacggttctgtagtcgctgttaaggatgtctcctttgaggtgaaaccaggggaaatattcggtttacttggtcccaacggtgcagggaaaaccactactctccgcgctttgtgtaccctcaccacccctgactctggaaaaatcgaagtttcggaaatctcggtgttagataaccctaaactagcacgtcaaaagctgggttatgtcgctcaagaggtggctttagataaggttttaaccggtcgagaactgctacaactgcaagcagcactttatcacctccccagtaaagttatcaaagaacgcattaacactgtattagatttactcgggttacaggaatacgcagataagaaaaccggcacttattccggtggtttacgcaaacgtctagacttggccgctggtttattacattccccagatgttttagtattagatgaaccaacggtaggacttgatatagaaagccgttttgtggtgtgggactttttgcgaaaattacgcgctggggggactacggttgtcatcaccagtcattatttagaagaagttgacgctttagctgatagggtagcaattatagatcggggtttggtaattgccactggtacaccttctcaattaaaagatcaagtaggaggcgatcgcattaccttacgcatccgcgaattttcaccaaatgaagaagcagacaaagcaaaaaatctgctgtcatctttaccttttgtgcaagaaattatcattaattccgcccaaggtaactccttaaatttggtagttactccccaaaatgacgctttaatttctattcaacaagcgttaaataatgcaggtttaccaatttttggtattgcccaatctcgtcctagtttagatgatgtttatttagcagcaacaggtaaaactttaatggatgcagaattagctgctgtagcaaatcgtgatccgaaagctgagaaaaaacaaaatatgagataggataattgataattgataattgataattgtcaattgtcaattagacctctccgaaaaagaatgtagagacgttccatggaacgtctctacagtagattctagcccggagattatcaatttgatgttgcagatttcaaagcttgttgaaaatcctctaaagaattaaccaccactgccaatttcaacatttcatctaaaatagatagggtttgctgaataaacctaaaaccttgatatatcaaaggttagaggctgataaacacagaaattagtgcaagggttttgaagggtataccggaaaaagtgtgcatttttggggatttcaagagatggcaaagaaattttcaaatctcctcctgactc

SEQ ID NO: 124 - DNA, 9165 bp, Sphaerospermopsis sp. LEGE 00249
  LEGE00249_162
cccttccccctgcaccctgcaccctgcttcccctcattgattttttccatgatccatactcagacacctcacaagcaccgctgttttttgtataacaaagaactaatgccttatgtagatgctcttcaatggcagcgatcgctactcaaagaacgcatcaataaccccgatctcgaagatgtactcatcttgctggaacatccgccagtttacactttaggacaaggtgcaaacccggaatttcttaaatttgacattgacaaaagtgaatataatgtgcatcgagttgaaagaggtggcgaagttacttatcattgtcctggacaactggtagggtatccaatcttaaatctgcaacgttatcgtcaagatttgcattggtatttgcgtcaacttgaggaagtattaattcgtgttttagcaaattatggtttacagggagaacgcattcccggttttacaggtgtgtggttagaaggaagaaaagttgcagctatcggcattaaagtgagtcgttgggtgacaatgcatggttttgctttaaatgtttgtcctgatatgacaggatttaatcgcattgtaccctgtggtattactgataagcctgttggcagtctagcagaatggattcccggtatcataggtttagaagtgcgttcttgtatagctcagtcattttcccaggtttttggtgtggaattaatagattcccattatgaataatacactagtagtcagtattcatgctataccaatagctatataaataacattataaccatacatggattaattgctgtataataaaatactgattatttagagtatatgtgatctcagtaaagcgatggggaaattccataaattttctgagaagattatgatctaagttacttttaaatcaagggagaaatggtaaaatttttatttgggtgttggttgcgttggtgtttagtgataggtttaagttgctggctattagctagttgtagtgtgaatcctagtgtggcaaaaactctgcgagtagcgactgaaccagcatttccaccgtttgagtttcaacagaatgggggagagttacagggtttttctattgatttaatgaaagcgatcgcaactgcggctaatttccaggtagattttcaaagtttaccttttgatggcatcattcccgcattgcaagctaaaaccgtagatgtggcaattagttcaattaccatcactcaagaaaggtcaaaaactgtagatttttctcgtccttattttaaagctgggttagcgatagctattcgcacagataaccaagaaattaatagttttgaagcttattaaaagataccagtttagttgcggtaattggttttgaggaattgtttagaaaaggacagttaatagttgcagaaaattatcgcgcctttgaaatttacgcagcagtagctgtgatttatttatgtttaaccttggtttcttctcaagcttttagtcagttagaagcgtggatgaatccaggaaaaaagccaaatgcaaagatttaataatttatgaattattcaggagtcagggtaatacagccgtttcctaagttatgaggtacaaggctaacaggcaggatgcctgttccacaagggttttatgatttccgtttgtacctcactaagatgaaatatgctgtaagtagaacgacgggaaaaaaccaaagtatctaaagaaaagtaaattaatctaaaaacctcttctctcttgcatgagtgcctcttgccttgtcataacgacaatttttaacgcctacctacttagttgtcagttgttacgatttttgaaacaagaagatgattttctctaactctagtctaaattaatgaaaagttaggggtaaacccgtacacagggataatgttcacagatattcgagactatcaaattctctttctcagtgtattcctgattttaggaattgctgctagggactggacattgcggcctgagttgattttaattgcgatcgccacttgtctagtcacacaatggatattgtcattattcattagtcattggtcattattaactaccacagcaaatgacaataagttaacatttaatttccgtagttctttaattactgctttaggacttagtttactactacgggctgaccattggacaactatggttttagccgcagcaacggcaataagtagcaaatttatcttgaaaacaggtgacaagcattttttcaaccctgccaactttggcattatttccgccttatcccttacctctgatgcttgggtttcccctggacaatggggggacgaatggtggtatggactgttattttttggtacaggaggaatgattttacaaaaagttggtcgttgggacactaccgcagcttttttaagtgcatattccctactagaagctgtgcgtaatatttggctaggttggacttgggatgtttacttacatcggttaatgagtggttcgttaatactgtttgcattatttatggtgacagatccccgatctattcctaacgctcccatcggtcgtataatttgggcagtttgtattgccatttttacctttattttgcggaattatttctttctttctaccgcagttttttgggctttatttgtccttgcgccgttaactgttctctttgataatctttggttttctcctagattttcttggttgcaagaagattagcagtttaataagattggcaggaaaatatttttaccaattcccaatcaccaattaccaatcaccaatcaccaaaaaaatgaaaaaatttcgtttattcattcccttaataatagcacttttcgctgttttatcttttgcccctacagctttagcattttgtggtttttatgttgccaaagctgatactaaattgtacaaccaagcttctcaagtagtcattgcgcgagatagtaataaaacagtattaacaatggctaatgattttcaaggtgacattaaagattttgcagttgtcgtacctgtacccacagtcatcaaagaggaacaagtgcgggttgctcaacctaatattattgaaagattagatgcttttagcgcccctagattggtagaatattttgatgaagatccttgttctccacaaataagaccacagtcaatgttagcaccaactgctgctgcaagaggtggaagttctgaagaaaaagcaatggcagataacagtttgggtgtgacggttgaggcacggtttaatgtgggtgaatatgatattttaatcctcagcgctaaagagtctaatggtttggaaacttggttaaatagcaatggttataaaattcccagaggtgcaaatcaattattaaaaccttacattcgttcctctatgaagttctttgttgctaaagtcaacttagataaatttgaggaatctggttatcaatttctcagacctttacaaattgcttatgaatcacccaagtttatgttacccattcgtttgggtatgattaatgctaatactgaacaagatttgattgtttatattctctcacctcaaggacaagcagaagttactaactaccgcacagtaaaaattccttctaatatgaatattcctgtgtttgtgaaaaacgaatttggggatttttataaatctatgttccaaacttcttacaccaaagaagataaaaaagtagcatttttagaatatgcttgggatatgggtaattgtgatccttgttctgctcaacctctcaatactgaagaactcaaacaagctggtgtgttttggttagataataatggtaataacaataatagaatcgcaccaggttttggttttccgttttctaataataatgtttacatcactcgtttgcacgttcgctatactcgcaataagtttcctgaagatttgatgtttcaaacaacttctaaccgggaatcttttcaaggacgttatgttttacaacatccctttacaggtaatttacaatgttctgcggggagagaatataaaagatcattaccccgacgttttgaaaaagaagcacaaactttagcccagttgacaaattggaatattcaaaacattcgtcaaaagatgaaactgactgtgggaaatatctcaacttcttggtggcaaaatttcctgatgtttttaggattataaactattctctcagacttttttcaaagttttagtttgtgagttgaagaactggggtatccccctaacctttatctaaaaaagggggataaattctttattagtcaggacttacgcaaaagatcacgaaagtacgggtaattcatgagtacgggtaattcatgaattacccctacgcaataatcagctttttagtcctattttgcgtaagtcttcttagtgcattaccaacatatattttgaactatgaatagtaagaaaaaaatcaagaaatttaatctttggtggcgatattcacttttatttatggtgctgtgggttactcctcctattatgcactttattaaccaagctttgcgtgggtatcctttggatattaactatttctggagtgaactttctttgtttcaaatttctaatctgggtttttataatggttctggtggtagtgattggaaaattggacaagcccaggttaatatatggaatgcggaacagttgcgaaccgtaacagagttaagaaattttgctttaaatttagttaatagagatagaaaacttaataatttaccgcctttagtagcagataatttactatcacaagctgctcaaattcatgcagaagatatgggagaaaagagatattttgatcatatttctctggatgggaaaagtccctatgatcgttatgttgcagtgggtggtaatagtaatttaggtgtaggtgaaaatatatatcaaagttcaggaacaggtttagggttaacttatggagaggtggaaaaattccaacgtggttggatgtatagtaatggacatagaaagaatattcttttaccagaatataaaaagtttggttatggcatagctatggggaaagatggtagtatttatgcagtgcaaatgtttagtaattaatttttaggagtcagtaggggcgaagcattcggaaaatagccttttcataaaattgataattgattgcccgaatgcttcgcccgtacagtaagaataaatactaatgactaatgactaatgactaataactaataactaataaccaataatctgagatatcctgataaatgatagagattggcttaaagaagtagaatgaaactggcagcaagagtaagtcaggtgacaccctcgatcaccttagcgatcgcagctaaagctaaggccatgaaagctgagggtattgatgtttgtagttttagcgcgggagaaccagattttgacactccagcccatatcaaagcagccgcagctaaagctttggaggaaggaaagactaagtatggtcctgctgctggtgaacctaagttaagggaagcgatcgccaacaagctaaaaagcgataatggtcttgattataaagcagagaatgttttagtgacaaatggcggtaagcattctctctacaatttgattgtggcattaattgatccgggtgatgaggtgattatccctacaccttactggttaagttatcccgaaatggtaaagttagctggtgggaagtcggtaatagtccatacagatgcttctacaggctacaaaatcaccccagaacagctaaaaaaagcgattaccccaaaaactaagttatttgtccttaactctccttctaaccccacagggatggtgtacacaccagaggaaattaaggctttagctaaggtaattgttgatgctgatattttagttgtttctgacgagatatacgaaaagatcctctatgatggtacagagcatattagcattggttctttaggtgcggatatttttgcccggactttgatcagtaatggttttgctaagggttattctatgacaggatggcgtttaggttatttagcaggaccattggaaattattaaagcagcgagtaccattcaaggacatagtacatctaatgtgtgtacctttgctcaatatggggcgatcgctgctttggaaagttcccaagaatgtgtagaggaaatgcgtcaagcgttcgccaaacgtcgtcaggtaatgtatgacagacttaacgctattccggggttaagttgtcctaaacccgatggtgctttttacctattccctgatatcagcaaaaccggtttgaagtctttggatttttgcaacgctttgttggaagaattgcaagttgctgttattcccggtgtggctttcggtgctgatgataacatccgcctttcctacgctacggatatggcaactatagaaaaggggatggataggttagagaagtttgtgcgttctcggatctaataggtgacggtgaataggtgacaggtgacagaaagtagttttttagtaggggtttatctgttagcttccacacccgccagagaataaattctctgtctcatagctcaagtccgttaaaacggactaatcaatttttcctagtgtttagtcatctttagatgactttctctattagcaaggaatttgagttccttgcgggatagaggttttatgttaagttgataccaatgtccccacctcttttcttaactgtcacctgtcacctgttccctgtcacctataaaatgtcatatttttgacattgttctatcagttttttcttgatgagcgatcgcacattttccggtgagactatttcgcaattttccccataacgcaacacttcccgcaccaaccaaaaagggtttgacacttttcttatcacttgacgcacttctcctacaacttcgttactgatgtcattgggttttgcttcataagctttcaccattcccccataaaagtgtaagtgtatttttagggtatctagcccttcatgccgccattgtccgttcactgggacaacacctttgattctatccagacgtaaacaacggttgtgtataagttctggaaagtcaggtttgacaatatcttcagtttcatcacaccaaatatttaagtaaaaacgcttttcctcaaaagcaatttccgcataacgcactgtaaatgatacatcctgtccttgagaattgctatagagtaagtgaaatggttgttgactttggcgaaattgatctgcaagtatgcgccatgcttccgtcggttggctaacttgttgaagtagtaattgacgcatcggtggttcaagctgaccacgttcaagtaacaaactagagacagtttgcgcttgttcaataaaaccggaatccttgagtattcctatagcttgctggagtgcggttacttgtgtggaattgagggtgaaaggttcaccaacttcaaactctttttgggcgatcgctacaagtaaaccagatatactaggggattttccccagaagatccgcaatttgcgggcgatttcttctagttgttcctttgttccagccggaattgacagtgtaattgtttcttttttcctattcatctaaaaagtgtaactacattattgacatattgctgatttacagttattgtatctgtatacaagggggataaaaaactttttagggtaaacctactgggatatttgtttttatgaaagaaaacttagctgatcgtatgcttgaagtaatgtcagatgcttgctggcattctacatatgagttagtagagaaagtgagtcatcggttttctgcaactatgcacgtcctcaagaaacaaggttatcaatttgaaaaaagacgtactcacggtcaaaagtatgagtatagattagtaaaagagtcaaaagcgatcgcttcgcttactacaggtaacacttaaaaaccattgatgaggattggggggtagtttttcctactcccatttctggaaaataggagttattgaggtcaaaaactatgatcgataatttactttctcgaatttccaatgaaaaactgacaccattggtggcagaaattggttagattcataatttagtcattttataaaagtgtaacaatggcagatggagatgatcaaatgcaaaacaatactcccacaattacagaaattcaagaattatcctcacaaattcctgagagaataccttacctaaaaatgttagttttatttagttctagagcaactggtaaaaccaaagatgatagtgactgggattttgcggttttatgtgatgaagaaaaacctcagaattgcatagcaaataatattggtcgtttatttgaattaccaatagtgattggtgaagttttgcacatcaatcctgacattatagatattgtacaactaaatcaatgttcttggttaattgctcattttgtagcccgtgatggaattatgttatatgaaaaaatacctggagagtttgataattttcgatttaattccttaaagactgaatcagagttaaaaaaattccgtcaagaacaacaccgaattattgaaatagagttaaacaagtggggagcatgagtaatatagattctgaaatagttttatcaagactaaggttaattaccaaatattacaataccttagaagaatttcgttctctgagtcttgatgaatttttagctgattttcgtcaacaactaatcgtagaatgttagataaacttccttgtttagataaacctttcctcaaagtttattggcattcagaagcatcactagaaatagcgcgtcctttattagaattggaagaattacttgataaaatacctggtgctgaattaattccccaactgtttgatacattaagaataatttttgaaagtaaacggacttgggaagaatgtcgttacagaatgaaagttttacagggtgcagattgaaactgaggaaaattagataatgacaattctcgatccctctcagtcttatacctttagcaaatattttgagatgcacatttcccctcaagattttgctgaagaatttggctatatagtcatttaacttaagaatgagacattaagatacacaataatcacggatgatttcatctaagggtgtatttgaaggagcatacattctggctctctttaaggcactaaaatcatgctcaatatc

SEQ ID NO: 125 - DNA, 8775 bp, Sphaerospermopsis sp. LEGE 00249
  LEGE00249_169
cccctacctcccctacctcctgcctcctgcctcctgcctcctgactccttgaactcctgactccttgaactcctgactccttgaactcctgactccttgatctccttgatctccttatgaaaaaaccaaaagttatttttttagatgctgtaggtacactatttggtgttaaaggtactgtaggggcaatttatagtcaaatagcccaggaatttggcgttacagttgccccagaaattttaaataaagaattttttaaaagctttaaagcagcaccaccaccgatatttcttgatccagatattaaagatattccccaaagagaatttgactggtggcgcatcatcgccctcaatacctttgaaggtgcaggggtactcagggaattttctgatttttcagctttttttagcgaactttatatacactttggtactgctgaaccttggtttgtttatccagatgtacccctagctttagtgaactggcgacggttgggagttgagttgggtgttttatctaactttgattctcggttatactcagtattacaaagcttaggactcagagactattttaaatctattaccatttctacccaagtacatacagctaaaccagatccagaaatttttaacatagctttacaaagtcataactgttcaccagaagaagcatggcatattggcgacagcattacagatgactatcatggcgcaagaaaggctggtttaaggggtatttggattaaccgccagtaaaattattaaataactcaccaaatttaccagtatcaaattaactttaaacatagttaatattactgtactagatcagttatttataggttagcttgtaatatatagaacttcaggttatgtaaaaataaagtaatttttttactaattttatctatatttgccaatatagtagtaaaaaaatacattttttacataattatcagtaaattgacccccttaaactaatgaccagaactttatcggaaatttggcaacaattgcaacaagctttttcagtacaagctagtctgaataccacaacagatacaggtaaagcaattttagcagcgacacaaagtattcacgaacaaaatgtcagtttagaagtcatcaaacctgtactagaaaactcatcttcattattagatgtgctatctttaccgttagcagagatagtaggtaaagagttatcttatgtatctcttggtgttaacttgttaaagttatacgctgatataactcaacaatgtcctgctttagaagaatgtgtattaatagttagccaagttgcttatttacaaagcatcagagatattttggctttataccctttcataaattgggatactaacctagataacctggaagaatttaaaacaaaattgcacattattaatgatattgaattagatgaagaaactgctaaaaatacaatttcctgttttcatgaatcagagttagcagcagcatttaatcaaatattatcagctagattaatagccccaaacatcacaaagtttttagtcaatcttttgacaaaaagagttgcttttaatactcatcgctatattattaatacctggatagatgcagatgatatcatccaggatttaattgcaaattcctgtgtagaatggcagcaagaacaacaaataattataggtattgaagaatatttgaaagaacatattgcaacacagccattagctaaagtatttgatcaaagctactcttggaaagatatttatattcctcttacagtcgaacctttcggtcaaaaagtcaatcctttagatatagaaacatgggcaaaaggagttatcctcaatcaacaaaaattagaacaagtaatgttgatagaaagtcaaccaggaaggggtaaaagtgttttctgtcagatatttgctgactgggtatggcaacatttacatcctttatggacaccaattttaattcgtctaaaagatattcatactgtttactctgctttttctttagagaaaactttgcaagcagaattgaaagttagttgccatcaaactaacgagactaatgagaatttattgcataataaaaatacgcgatttatatttattttggatggttttgatgatttgcacattgatttagaggaatttattcaacaagtagccgcatttcaaaagaaatgtaaaaatcaagctgaaatggggcatcgcgttttgattactggcagaaccaacacgctaaaatatattactaatttaccccataatttagagcgcgtagaaatcctagaaatggatagaaaaatccaagaaaaatggttaaaaaaatgggctttgttgccagaaaaccaagtacaaaaaatagatttagatgattttttatctagtaaaaaatgtccatcaaccattaaaaaattagcagttgaaccactttatctgcatttattagccttgatgtatcgagatgaaaaattggcattcaataaattagaacaagctaataaaagaactgcaaaagtggtaatttggcaagagtttgtcaattggttaatagccaaacaaaaactcactttagatgatagcgaagtcaataatcaagaatatcaaaattaccaatcatacctacaaaatcttctcacagaaactgctgttgctgttgtccagtctggcggtgtatttggttctgtgtcaatgatcaaatcccggttacaagaaccacaaacagatattcccgcaaccttaaatcagttctactttattcctgctcaaaaacaagaagacaagattgaatgttatcataaaacatttagtgaatttctgtttgctgaaaagttaaccaaatcgctacaatattggtcaagatttaatcttgatgatcaagagcaaattcaagaaatgaactggcaaatttatgatttgctaggatttggaaaaatcaattcagaaatcgttgaatatgtaattgggttactcacacaagtttccgatttatattggattaatctatttaaggtgttagagaacttttacaataactggtgtcaaggaaaattcattgataccccagaagcaactttagcccaaaccaagctaagagaattacaacaatacagcgaaaatgacaggattgaaaatttaggtcaacgccaaatagatatctatgcaggtttgaatgtcatgattttgctgttagaaatacagcgatatgcccaagaacatgatgtattaaaagaatacataattttctatccatcaggagaaacccaaggagataatttaacatcagatttgcagcgactgattaactactgtaattgcttgcggggagatagttttaaaagtatagtgggacaatttttcagtgctacacatcttagagctacttacctctttcaaacagacttgagttgcacagacttgagccaagcagacctcagccgtgcagaacttagccgcagctatttattgcaaacaaacctcagtcatgcctacttgataggagctaaattgattcaagctgacttgcgtggtgctaatctcagcggtgctaatctgattcgtactgatctgagaggtgcagacttaagtaatgctaacctgcaagatgcagacttgagccgagtagacctaagtggtgctaatttgagaggtgctaaccttagcggtgcatacctgattggtgctaattttggtgatgaattgtttggttatatccgctgggataaaaatactaactgggaagatgtggacggactagaagcagctaaaaatctgccaccgactttaaaacagcacttaaaaatgggttaaacctgaaaatagctgtaaatagtttcctagaatcaacaggaatattaagataagacgctagggatattctgtatagaccgatatataccaggagtcaggagtcgtaggggcgaagcttgaaggcgaccaatgatcaattttatgaaaaggctatttttctgcaagggcgaagcattcgggcgaccaatgatcaattttatgaaaaggctattttccgaatgcttcgcccctacttcgcccgtacaggagtcaggagtaaaaccctattagagtgagagtttcatgattcattgatgtcctaactactctgtctacggctatatttgagagtctatcccgtcatccactgtttgttgttgaatctatgaagtcttatttagccgccgctattcaaatgaccagtgtgcctgatctagagaaaaatttggcacaagcagaagaatttattgatctggccgtgcgccagggtgctgagttagtgggtttgccagaaaatttctcttttatgggagaggaaaaagataaacttgcccaaggagatgcgatcgcccaaacaacagagacatttctcaaaaaaatggcgcaacgctttcaagttactatcctgggcggcggctttcctgtacctgtaaatagcacaggtaaagtttacaatacggctttacttattgatcctaatggtcaagaacttgctcgctaccacaaggcacatttatttgatgtcaatgtccctgatggtaacacctatcaagaatctagcaccgttatggctggtaaggaattacccccaatctatttttcggaaaacttgggtaatattggactttctatttgttatgatgtccgctttccagaattatatcggcatttagcagataaggaagtccatgttgtgtttgttcctgcggctttcacggcttttacagggaaagaccactggcaagtattattacaagctagggcaattgaaaatacttgttatgtcattgcaccggctcaaactggtactaactatgctcgtcgtcaaacccacggacacgccatgattattgatccttggggtgtaattttagctgatgcgggggataaaccaggagtggcgatcgctgaaattaaaccttctcgtttggaacaggtgcgccgtcaaatgccatctttacagcatcgagtcttttagcaaattagatccccgacttcttgaagaaattggggatctagctacaaatatcaatgatcaaaattgagttttcataccttcggtgtaaatattatctagggtttgctgaaaaaaaaccgggaaccacaaacgcccccggtttatttatctataggtatagcaaggctataccctattttatttttgagaaaaaattaaactttagcagcagctttcattactaattcgcctttagcgtatttagcagcaaactcttctaaagaaacttgtttgatcttgcttgcattaccagcagttccaaactgttgataacggtcagcacaaactttttgcatatacttaatcgaaggcttcaagaaatgacgaggatcaaattccttgggacctttagccaaagcttcacgtacagccgcagtgatagccaaacggttatcagtgtcaatatttaccttacgcacaccactcttgatacctttttgaatttcttcaacaggtacgccgtaggtttcaggaatagcaccaccaaactcgttgatcaatgcaattaaatcttcgggtacagaagaagaaccgtgcattaccaagtgggtgttaggtaaacggcggtgaatttcttcaatgcggctgatcgctaaaatttcgccagtgggtttacgggtaaatttataagcaccgtggctagtgccaatagcaacagccaaagcatctacttgggtagcttctacaaactcaacagcttgatcaggatcggttaacaattgagaatgatccagagtaccttcaaaaccgtggccatcttcagcttcaccagcaccggtttctaaagaacctaaacaacctaactcaccttcaacgctcacacccaaagagtgagcaacattgacaacttctttggtgacagcaacgttatattcaaagctggcaggagttttagcatcagcttccaaagaaccatccatcatcacgctggtgaagttgttcttgatagctgaatagcaggtagaaggagcattaccatgatcttggtgcatgacaatgggaatatgaggataggtttctaccgctgccaaaatcaggtggcgcagaaagttttcaccagcgtagttacgagcgccgcgagaagcttgtaaaattacagggctatctgtttcatcggcagctttcatgattgcttgaatctgctctaagttgttaacgttaaaagcagggataccgtaaccgttttcagcagcatgatccaaaagtagccgcataggtacaagcgccatagatagtcctcctaatgtgtttgtcagctaatcagttttagacaggcgtaatgtttacgctaatcttaagagttttttcaacttataggaaattatatctagtatggggtgtttatgttgaaaaagtttgcggtcttactctatcaaggtaatctatagtttccatgtactgttgtcatattagctactgtcaacagtgttggtttggtaggctaggtgactggtgactagtgactgggaataatggatctgttgtttgcttcctaactcgccacttttgacttttgacttttgacttccccaagggcgctcctgtttccttgctgactacagcagttttcatgtctttagaccacagtcagggcgaagcattcggatgatagtcttaggtaaaaaccgataattaattgtccgaatgctgatgcttccagcacgcttcgcgaacgcccctacatttttgaagcgaaacctaaatcaaaatgtggtttatttacctgaaaatagctgtaatgccaaaattacgatcgcataaggtaacatcaacaaaaattgatagggaatatttgcacccaaggcttgtattctcatggatatcaagctttggatcgggttcaatctagcgcaaatcaagtaaacttaactaaattgttgtgcataaaaccgcgcatatcttccttctaatgctaacaattcttcatgatttcctgattcgacaatttgccctttttctaagactaatatgcgatcgcattttctcactgttgataatctatgggcaataattaacaccgtgcgattttccattaatctttctaaagcctcctgtactaaggcttctgactcggaatctaaggctgatgttgcttcatccagtatcaaaatttgcggatttaagagtacagcacgggcgatcgctattctctgtctttgtcctcctgataagtttacacctctctcacctacccaagtttgataacctgcgggtaattgcataataaattgatgagcgttagcgatttttgcagcttcttcgactgctgtcatctcaaagttttcttgtccaaaagcaatattttgagcgatagttcctgaaaacataattgtttcttggggaacaataccaatttgttttcttaaactatttaatgttacatctttaatattaacatcatctataaaaatatccccagattcaggatcataaaaccttggtaataaattcacaaatgtagtttttcccgcaccagaagcaccgacaagtgcaatagcttctcctggatttactaataagctaatattatttaataccagttcaccaggtttataagaaaaacttacatcacgatattcaactttaccattcacatcaggaagggtaatagaaattgggttttctaataccgtcggttgaatagctaataactcaaaaacccgatcaacagaagcctcaccttgtttaaattcattataattattggtagtatgaccgataggatcaattagcaaagctgctgctgctaaataactgaaaaattcacctaccgttaaattattttgggaaatttgccaagctcccaccatcaacaaagataaagcactgacagcttctaaaaaaccgacaatgggaatttgtattgcttttaatctttcggcggaatatttagcttttaaagttctttctgcttcatgactaaatctattaatttcgtaagtttctgctgcaaaagcttgaattaaacgaatcccactaaaaacttctgttaaaatagctgataaatcagaaattcggttttgacttttgagcgaaaatttgcgtaaacgttccccaaaccaaccaattaaaattcccataattggcgctacaattaccgtagctagggtaagttgccaatttaaataaatcatgtaaatgggaatagcaattagttgtaaaacacagggaatcaaatcatgaaacaccttatttacaacttccccaactcggtctacatcttctgttaacctataagataaatctccagcttttgcagtttcaaaataactgagattgagtttttgtaagtgggtataaacctgttgacggagataaaaagcaacccttaaagctgccttagccatatataaatcttgtacagattgaaaaaacccccgcacaagaaatactaaagcacaaaatcccgttaattgagcgatcgccactacattaccctgtccaaagggaactgctaatttacctgcaagattaattagcgttaacgtagctaaaacatagcctataatacccacaaatcccttagaaatagtttcccattgtttgcggatatagggtaaaagtaaccaataattagaacgatttttagtcattagtcattagtcattagttattagttattgggttattcatcctcccagtcaccagtccccagtcaccagtcaccagtcaccagtcaccagtcaccagtccccagtccccagtcaccagtcaccagtcaccagtcaccagtccccagtcc

SEQ ID NO: 126 - DNA, 8513 bp, Sphaerospermopsis sp. LEGE 00249
  LEGE00249_173
atcatcttcagtataaaaacgatgccccgacaatgttcttttggctggaagtcttccttcaacatcccatctttgcaaggtcttgactgaaactccgatttttttagcaaattcatgaggtttaaacataaagtcactcataggtttgtctattaaattgtcaacttaggacaagctcttcccagtccccagcgatgcactgagcttgtcgaagtgtccccattccccaatcacctgtacctaagacaacgacatcacgcataattatgtaattattattgaagttttcacctgtacatcatgatgagcgaactggagcggtattatagagtattagatttagagcctggagcaacactagaagagatcaaccaggcttacaaagatttagtgtttgtttggcatcctgatcgcctacctaaagataaccaccgcttacagcaaaaagcccaagacaagattaaagccttgaatgaggctcgtgaaaaattacgttccctaaaagatcaacctcaaactgcaaattattctagacctactcaaccgaaaaaaccatcttcgagttattatcaacccacacaaacaaattaccaaccaccaaatcaaaatcctgacttgagcggcaaagattttagtcgcgctaatttgagtaataaagacttatctggcagaaatttgagttatgccaatttaagcggttctaatctcagtgatacttttatgcacaaagttaatcttagaggtgcggatttgtcggaagccaatttatttagagctaacttgttgttagcagatttgagagaagcaaatttacgctcggctaatttgattggtgcggatctaagtggtgctgacttgcggggtgctgacttgacaggtgcaaggattcgttcaggcgatcgcttgctggtgaaattaatcggtgctaacttaactggggctattatgcctgatggtgcaattcatcgctgaaataccctgagttaatgacaaaagatgaagaactaagttaaccttcctgcaatatgggaaacttagtaatattcctgatcccatgaatttatgaaaaagagtatcttacgttacagaaattttcaaatgttctgattgaagctacttgagggggttgatattttgtctcaaaaggtatttaggttttgctgtttaaattttcaggaaaaagttaatgaaaaattagcgacagttattacttagaaactcttgtaattagcgattttggcaaattgaattggacaagtaatttaatttttcgtatttagatagtcatgaatatagcaataattggatgtggttatgttggttgtgcagttgctcaatattggcagcaaaataaaaattttattatcaccgcaaccacaacaagtcctgaaagagtccctggactacaaacagtagctcaaaaagtagtagtcactaaaggcaatgactatgaatctctcaattctgtcttaaaaaatcaagatgtcgtcttgttaagcgtaggcgcaaaaagtggaactacctatgaagaaacttatttggaaactgcaaaaactgtagtttctatcctcaagcattctcccaatattcaccacttgatatatacaagtagttattctatttatggtgatagaaatggtgtttgggtagatgaagaaacaccaccagcaccccctaattttaatgctcaaattctccgcaaaactgaagatgtgttactatcagcagaaaatgaaagtctgcgggtttgtattttgcggttagggggaatttatggacagggtagagaactggtgaaaatatttggtagggttgctggtacaactcgtcccggtaaaggtgaagaaatcacaaattgggtgcatttagatgatattgttagggctatagaatttgttcgtctacaccgcttacaaggtatttataatttggtcgatgatagccatctcaccagtcgagaattaattgataatgtcctgacaaaacataatttaccgaatgtgatttgggatgcaacaaacaagagtaaccgccaatataatacctgggtgtctaaccaaaaactaaaagatgcaggatacgaatttattcatccccacatcattttctagtaacgattgaatttgataattatgccgccaatgttagctaattcctctaccatctccgcatctcctacccaattttacaattggggaaattatcgttgtgcttatgaagtacatcaaccgataaattctgaagtttcaggtgtgcctttattattaatccatcctattggtgtaggattatccaggcagttttggcagcgtttttgctgtgaatggtataatacaaatcatggcaatatcatttaccaaccggatttattgggatgtggtgaaagtgatacacccaggaaagcttatacaccaattgattgggcaaaacaattacagcattttttacaaaaaatcgtccaaaaacctgtaattttaatagtgcagggtgctttatttccagtagcaattgaattagtcaaattagaacctaatttaattactggactggtactttctggaccaacatcttggagtataattaccaaaaatgcacctcaatggcgacaaaaattgctgtggtctatttttgattcacccataggtaatgcgttttttcgttatgcacgtactcgcaaatttttagtttctttttccacagaaagattgtttgcatcaggtgatgctgttgatgaggaatggttaaatactttaatagcagatgctcaaaatatgggtggacgctatgctgtattttcttttttggcgagattttggcaacgggattatagtcatgatattgcagctatgcaaaaaccgacattagtagtttttggagagcaagcatcagctattagtaaagaagggaaaacagatacagcagaagctaatttagctagttatctttcttgtttaccccaaggaaagggaataaaaattaaggggagaaatgttttaccctatgaatcaactgttgattttgtggctgcaatatcgccatttattcaaggattaagtagttgatattcatgctgcaataaataaataatatattcttcagtccacgcaggtggactttgtttttataggagtgaattatattcacctttatctttatgtttactaaaattcatcagcaagtctataatataattattaaacaccaccacaggagtccgtatgacccagatatatgagggagtacgctggacaagctcagaccttgaactattgccagataacggcaaccgttatgagataattaatggagaattatttgtgacaagagcgccacattggaaacatcaaaaagctggcaacaatgtttgtacagaactcacactttggtctagagaaaccggtttaggagaagctgctactgctcccggtattatttttactgatgctgataatgtcattcctgatgtggtttgggcaagtaatgaaaggttagcaactttattagatgatgatggacatttaacaggtgcgccagaattagtcattgaagtgctttctgctggtgtggaaaatgaacgccgagataaagaagtgaaattaaaactttatgcttctagaggtgtgcaggaatattggataatgaattggcgattacaacaaatagaagtttatcgcagagaaagggcaatattagtattagtagaaactctgttcgctaacgatgatttaatatcgcctttattgcctggttttagttgtgtggtaggtagtttatttaagtagaaaaatccttaaatttaagattgaagattgaaagacaaatattttctagaaattaactaaaatggtacacacaatacaaaaaactctcacattggaagagtttctgcaactaccagaaacgaaaccagctagtgagtatattgaaggtcaaattattcagaaacccatgccacagggaaaacatagtatacttcaaggtgaacttgtacctgcgattaatgttgtcgtcaaacctcaaaaaatcgctcgtgcatttcctgagttacgttgtacctttggtggacgttcaatagtaccggatattgcggtttttgtttgggatagaattccccgtgatgagaatggagaagttgctaatacatttctcacctatccagattggacaattgaaattttatcacctgatcaaaatcagaccaaggtaactaaaaatattttgcattgtttaaaatatggtactcaaatgggttggttaatcgatccaggggaacggactgtttttgtttatcgtccgcaacaacaaattgaggtatttgatgaatcagatatgttaattactgtgccgtcttttgctgaggatttacaattgacggttggtgagttgtttgggtggttgttagagtgaagatgtaaaatataataattacagatgttaataaggtaattttatgaaactaacactgaaatcaaaagttgacgctgatggtaaattgttgttacaacttcctcaacatttagctaatcaagaattagtcattattattagtgatgtttctgaagataaactaccaacaccagaagaattaggatatcctgctgatttttttgagaaaactgcgggaaaatgggaaggtgaagttttggttagggaaaatttatttgattgtgatcaaagagtttgggatattgaataatgatttatttgttagatactaatacctgtattcaatatttaacaggacgtagtgaaaatgtaattaataaatttaaaactactcctcgccaaaatatttgcttgtgtgatgttgtcaaagcagagttatactatggagcttgtcgcagtaacaaaaaagaaaaaaacttagctttatatgagttatttttttctcaatatgttagcttaccttttgatggaaattcagctaaaatttatggtgcaattcgcgctgagttatccaaactagggactcctatcggtgcttatgatttccaaattgctgctattgcattatctaataatctgattttagtaactcataacactagagagtttcaaagagtggaaaatttacaagttgaggattgggaagaaaatatataagcgtgtaaaatgtaaatgttgaggcagatcctcaattttgcattcccagtctgagactgggaacgagagaacgggaaaaaagtttaagttttttatacaagtattcctaattcaaaataaacaaattataattatgctgctatgacgagaatacagcaatgcttatactttttattcacggtgttgcagaatataaaactaaatttgcagaaccgctaaaaaccttaattcaaacagagttttcccaaagaggtcaaaaattacctcattttcattctgggttttatgcagatattttaacaaataaaggcaaaatatggaacttcattcatcaagacttagcaaagtttaaacaagaaaatccttatgttgatagtcaggatattttaagaggtaaagatttaagagaaggatttatatctgattttgttggtgatgcgtttacttacctaaattatcagagaggaaagaaaattagacaatccatagctgaacatttagaagattttatcacaaatcactcacaagaaaaagagttacatataattgcccattcaatgggaactgtaattttatgggatatgttgttttcagagaactttgaaaataatgatccatctgttaagtttagagaattaattaataatcaggtacaactaaaaagcattactacaatgggttcaccagtaattctatttaatatgctgttagatattcctgctgaacaagtgaattttaagtgtcaatcatttaaatatcctttacggtggttaaatattattcattcctctgatatgattgcttatccgattagttctagtttggaaattaaagaagattctaatattagcgttacagataaattcattactgacaatgcaaataatttagaaagttctgtgcgtcaaatagcgaattttcctggtattaaaacagtaagtgatatcacatctattaataaagttcttgatttaggtgctgttgctgctggtgtagcagacgctcatattggttattggaattgtccccaaacggctaaaatgattacagatcatattttaggtaatgaggaaaaaattattaatatagctagaccagcgagtaaatttatgtcagttattgcagctaaaacttacgtagagtatcggaacgatggatattgggtggaaggaacacggatttctctagattcgattgtctatgctttccgaaaaggcttatcacctgaaactatcgttcaatcttttcctctgctaacgctagaacaggtttatggaggaatcacgttttatctagctaaccgcgctgagattgatgcttacttggcagatgaggaagcggcttttgatgctatgcctcaaccattacaaaccagtgatcctattttatatgacaaactcaaggcagcgaaaacagcaagagagcaggtaaaattgtgaatattcgctatcaagctgatgctgatttgaatcagtctattgtaacgggagttctgcgacgagaacccagcattgattttcaaactgcctttgttgctggcttagaaggtgtaaaagattcagaagtattggaaatggctgcacagcaggggcgtatccttgtcagccatgatcgtaaaacaatgccatcagagtttgcacagtttattaccaagaagcaaagtacaggcgttattattgtttctcgtaagttaccgcttgaagtcattattgaggaactattgctaatttgggcagtatccagtgcagaagagtggcttaatcggattgcaaaattacccctttgaggtaagctaaaaatgctcacatagcccggttttcaacaattttcaaatatatttaactaaaccaagtaattacaaaaaacaactatgacacaacaacccatacaagtaataggcggtggacttgcaggaacagaagcagcatggcaaatagcccaagctggcgttcctgtcatcctccatgaaatgcgccctaaacgctttagtcctgcccatcataccgaaaatttagccgagttggtatgtagtaactccttcggtgcaatggcaagcgatcgcgcagcaggtttattacacgaagaactccgtcaactcggttctattatcatctctaaagctgatgaacacgcagtacccgcaggaggtgctttagcagttgataggggagtatttggggaagacttaacccaaactttagcaaatcatcctttaattgattttcgcagaggtgaagttaaagaaatccctgaaggtattgtagtattagcttctggacctttaaccagtcccgatttatccgcagatttacagcgttttacgggaatggaatatcttaatttctttgatgctgccagtccgattattttaggtgattctattaataaagatattgcttttatggcttcccggtatgacaaaggtgaagcagcttatctcaattgtcccatgaataaagagcagtatttacaattttgggaagaactacgtcaagcagaacaaacagaattaaaagactttgaaagagaaacagcgaaattttttgaagcttgtttaccaatagaagaaatggcacaaagaggggaagataccatgagatatggtcccctgaaaccagtgggtttaactgatagtagaaccggagatcgtaactatgctgtggtgcagttgcgtcaagaagataaagccggtcaactgtggaatatggtgggttttcaaactaacttacgttggggtgaacaaaaacgagtttttagaatgattcccggtttagaaaatgccgagtttgtcagattaggagttatgcaccgcaatacttttttaaatgcaccccaattaatgttaccaactttgcaatttaaacaacgtcatactttattagcagcaggacaattaataggaacagaaggttatactgctgcatctgctggtggttggttagcgggaacaaatgcagcgagaatagctttaggaaaagaacctttaatattacccaatacaactatgatggggtctttgtttgagtttatcagttctgctgcacctaagcattttcaacccatgccacctaattttggtattgtcccagatttgggtgtgaagataaagagtaaaccagaaaaatatggacgttatcgagatagatccttagcagatttagcaagttggaaaactgcaaacttaggataaattaagatcctcgattttttttgatattgtcaattaatgatatattaatcatagaagtcggggttctaagttgattatctaaatctatacttgcagaaatgttgaatgtcgttacaaaagtttacatattcagttatagtagtcctattaagggtgaaaatgtcaacatctcatgatatcttccatccaatgaacataactaatttgttgacacatacaa

SEQ ID NO: 127 - DNA, 8342 bp, Sphaerospermopsis sp. LEGE 00249
  LEGE00249_175
aggagtctgggccgtgtctcagtcccagtgtggctgatcatcctctcagaccagctactgatcgtcgccttggtagtcccttacaccaccaactagctaatcagacgcgagcttatcttcaggcgattaatctttcaccttccggcacatccggtattagcagtcgtttccaactgttgtccccgacctgaagccaaattctcacgcgttactcacccgtccgccactaactcctaagagtccgttcgacttgcatgtgttaagcataccgccagcgttcatcctgagccaggatcaaactctccgttttgttaagtttgcttttagctcttttatttttgtttactaacgtatccttttttatcgccagaattcgttagctgaatttctttgacgaggaatggtcgtctttattttttcaaagtattattttgtctcggttcagtggtgggcttcgtttgcctcacctcatttaatatagctgacctctctgggaatgtcaactactttttcaaaaattttttagactttttgggaaatgggttgaaagctttattggaacagggtttggtgctgttgggactaccattatttgtgcagaggggaggagaaagggttggattttgtgatctatttgaatttttgaagtggtgaggttaatttgctcatgtggtcaaatttgccaaaatatatctgtaagctaggatcagtgggcattcaggatggtcttttggggttcaggatggaaggtctgctggttatatatcaaataaataggaaggatgtatggatagcaataactggttggaacagttaatgatgttaggtttaggaactacatctttggttgctgataagcttaaacaggtaggtgatgaattggtgaaggatgggaagttgaatcctgagcaagctaaggtggtgatggatgatattgtgcagcagttgaaatcggagcagggtaattgggaagtgcagatgcaacggcagatgcggaatatgatgcaagatttgggggttgctcgtcagtctgaggtggatgaactgcggggaagaattgatcgtttggagcgtcaggtgcgggatttggaaaataagctgtggcgttagagtgcggattgtgttttaaactggtttctgtcctgttggtaatctgtttaccaagctacctatatagggagggctgattttgaaaggaatttttttgagcgtggtattcatgctggtgtgtattgtggctttggtattagtacaaatgggtggtaatcaggatactgctgttgctgctaagttaagtcaaaatccaccagtttccactgctgtaattgaagaaaaaactactctagtagcgagcaatattatgtctgatgcgaatgtcgtaactacttcctctggactaaagtatattgaattagcaaagggggatggtgaagctactcctcaaaagggacaaacggttgtagttcactatactggtactttggaaaatgggaagaagtttgatagttcacgcgatcgcggtcaaccttttagttttaaaattggtataggacaagtcattaaaggttgggatgaaggtctgagtacaatgaaggtgggcgatcgccgtcagttgattatcccttctgagttgggttatggcgcgcgtggtgctggtggtgtgattcctcctaatgctactttgatttttgatgtggaattgttggatattaaataaaatttggtgatgggtaatgggtaatgggtaatgggtaaacaaattaccgattatcaattacctgttattgttaataattgtttggtctagctaggtttttgaattttgtaaattgaggatcaaataatagttttactgttcctgtaggtccgttacggtgtttggctataatgacttctgctattccgcgatctggtgtgtctggtgagtaatattcgtcgcggtaaagcatgatgactaaatctgcatcttgttcaatggagttatgaacaatgatgttattggcgacaaagttatgtaaattgggaactgttaagtcaaatacttcttcttctctatctggtatgattgcgacaattttatcccaatcagtcatggtttgtttacccgaaatagatagatgtcttggtaaacatatatgttgtttaggacttaactcatctagtcttttccaaccatgaattgtgaggaatttgtgattagcagttgctctaatttttcttcctagtcgagtttttaaggtaaatacaggtttgatacctgtagaaaaggcgttactcacaatagctttttctagcttcattgttttttcatttaatgcccaaactgagaaactagattgccctactaattctttaattggtacttgtaatccagtatttgctaaagtgattaagctatcacctgttaaacaaccagattctcttaaatctgacaacatcgggcgtttattagtccttgcttctactccccgacttaactgtgatagggcaattactggtactgataattcccttgctaaaccttttaaagaacgggtaatttttgatagttcttgtacgcgattatctcctgcgccttccattaattgtagataatctattattattaatcctagttctgtgttctgttgtgcttggagttttcgcgattgactccgcatttgtgtaactgtaatattgggagtgtcgtcaataaaaatgggcatttctgaaagcataccaattgcacgacctaaagagtcccattgggtttggctaatacgtccacttcgtaaataaccgctttcaatttgggcttcactggctaatagtctttgtactagctgttcttttgacatttctaagctgaatactgcgactggtaatttataacctgcggcgatgttgtgagctaggtttaagcaaaatgctgtttttcccattgatggtctgccagcgacgatgattaaatcagaacgctgaaaaccgctggtcatggcatctaaatcataaaaaccgcagggaataccaggtaaagcaatgccttcatgtcttttttcaacgtcttggaaggcgttaattaatgtatctgctatgtgaactaaacctgattctggtttttcttgagtaatactaaatactttctgttctgcttgatctaaaactatgggtaattctgtttgtgtctcgaaacctagttgtacaatttcgttacctgctttgattaattgccttcgcaggtatttttccatgactaattctgctagggcatctatgttaactgctgatactgtacgatctactaaagtggctaatttatttctgccaccaatgcgggttagtttatcgttgtctgttaaccaactggtgagggaaagtaagtctgtgggtttactttgggcgtgaagagtgagggcggcttgatagatttctctatgggcgttaatataaaaggcttcgggaacgaggcgatcgcgtactcttcctatagcttctggatctaggagaataccccccaaaatcgcttcttctgcttcgatgttttggggtgggagacgatcgctgccatcaccttgaaaacttagttcttcagccataagcaatttaggatttatcagcaggatttaaatattagcttcaagcttaacttggtagtttgcaggtaaaaggcaaaaggcaaaaggcaatacttaattttcttcattaccctataaccttcttacctgtcacctgtcacctgtcacctatcttagctggcaacaacttcgatatcaatttgggctgttacttcagagtgcagcttgatttcggctttatatgtacccaggtggttgatatcagaaatggtgataccacgtttgtcaatttcttgactggtagctgctttaattgcatctgctacatcttgggtggtgacagtaccgaagatggcttcgttttcgcctacttgcttggcaattgttaatttagcaactttttctagggctgctttttgctcttgtgcttgttgtttaagttctagttgacgttgacgttcttgttcacgacggcgttctacttgtcttaaaataccgggggtaacttgagtagctagactctggggaatgagataattacgagcatagccgggagctacatccactaagtcgccggattttcccagcttgctcacatcttttgttaatactaactgcactcgtttggccattgtttttcttttttcctgtaaaatctcgttaaattgggtgtcagcaggataggttacaaaagtgtagcttgacgagaagcgactttgtttatatcccaaagactagatattttaacgaattatggggggcgatcgcaacactcaatccccaaaaactttgcccaatattggctcaatatattttaggatttacgcaagattggactaaaaatctgattatttctggggggtaattcatgacttactcctactttgcttctgttttgcaccagtcctgatatttataagttaagtaaattctctgttgctttttgtgtagatattttgcgctatttatcggcaatattgagaaaataaacaatttttgggttgtggtgacataaaaattacaatcattattataatggttgcagttatttaacacacatcaccatgagttcaaagattaagggtttacaggcaagttacgctaaaactcgcttgctgcttgcgttgtgggatttgggaggaagtcaacagaaggttgctaagggtaaataaggtcagaagatggcggactatcagggtattttagaggatttggaagcacagggagcgatcgctgtctctaaaaaaggttctgctattagttatactctcacatcaccaacgggtttagaggtgttgggtgcgggtttgcgtagtaaagagtttaagtttgaggaaactattgttggtactttggctgctaatgcactgttgcggtggatcagtgatcttaatgttgtgttaggtgcgccggttgcgtctggtaatggggttaagggtggggttattggttcttatgaggagtttaagactgtcgctttagatgtttatgataagttgaattacgaatataacctggatgatttagtgcctatttatcgcattagaagagcttgtcctaagttgacaatttaatagacaaacctgtacactcatagacaaacctatgagtgactttatgtttaaacggcgttgcataagtgtgggatgaattagttgaacacgggtatttgattatatttcaaataatgaagtaataatctaactgaatatttaagcatatctacggatttagaataacataatgtctttctatgtagacgtgctagataatgacgtaaacgtgtattttctccttcaactctagtcatatatgttttactcacaatatggtcttctggttgaatgaaactaggataaactttccatccatcagtgacataaaaatagcattgccagagtttaacaatatcccacaaaggctgaaaagtttccgcactgtggtctcccaaaacccaagctaaaatcccttgactaaagtgatttactgctgtccacaaccaaattttgttttttttgagccaataaaagtctctaattcatctaattcacctacttctggtatttcctcaattggtggtgcatctggcaatttctcaccaatttgtttaacccaagaaattacagttgtatgatgaacaccttgagtacgttctatggctctaaatcccatcccattgacgtaggattttaagcaatcttgtttcacttcatttgagtatcctcttggtggactataaacatctataaactgacgaccacatttgacgcaaatgtgattttgtttacctctgcgttttccattttttctaatctcaatagacccacagtatggacaatgcaccgtatcaaccctcaattcatccctctattatgcaacgccgtttaaacctcatgaatttgctaaaaaaatcggagtttcagtcaagaccttgcaaagatgggatgttgaaggaagacttccagccaaaagaacattgtcggggcatcgtttttatactgaagatgatttactgattacccagggattaaaacctgtagactcaaaacgaaaagtagttgtttattgtagagtttcttcgagtagccaaaaacccgaactcagaaaccaagtatccgcgatggaaacattttgtttgagtcgtgggttagctgttgatgattgggtttcagagattggaggcggattaaactttaaaagaaaaaagtttttatcaattatgttatcaatgcttaaaggcgaaatatcgacaattgttgtggcgcacaaagacagaatgtgtcggtttgcttttgactttattatggaattagcaagttccgtgaggtgtcagatcatagttgcaaatcaggaatctttatcacctcaacaagaattagtggaagacctaatggcaattatccactgcttttcttgtcgattgtacggattgaggaattaagctgttacacagctaaattgtataatcctaatattctgaactcttgtggaacaggcaagatgcctgttccacttatacaaattaaatgcacaacagcttactccaaagaaatcaaggatcatctcaaaaatgctattgacaaacctgtacaagatatgtcagttttagacagcaaagaaatacagtgttgaggtcgagcaatgcttttatctatcaaaacaaaactcaagttaaacaaaacccaggaaatattaatggctaaacacgctggtatagcaaggtttacctataattggggtttagctacttgggcttctttgcataaagatggattaaagccaaacaaatatatcctcaaaaaattctttaataaccatgtaaaacctgaattggcatggattaaagaaaaaggtatttgtcagaaaatcactcaatacgcctttgatagtttaggtgaggctttccagagattttttaaaggacagtctaaatatcccaacttcaaaaagaaagggaaaaatgatagttttacaattgatgcaggtggtaaaccaattcctgtaggtggcacatcaataaaactaccaacaattggatgggtaacaacttatgaaggattacctcatactacttgcaaaagcattactatttctagaactgccgatagttggtatatagccttttcttatgaacaagaatgtcaaccaactattaaaaactatactattgttggtgttgatttgggagtaaaggaactagctacactaagcactggtgttactttccctaaccctaaacactatcaacagaatttagctaaactgcaaagattatccaaagtctattgcagaaaggcttcatgttcaaataataaacacaaagccaaaactaaactagctagacatcatgcaagaatagcaaacctgcgaaaagacactcttcatcaacttactacttacttatgcaaaaaccacgccaagatagtagtagaagatttaaatgtttcagggatgttgtcaaatcataaattagctcaagcaatagctgattgtgggttttatgagtttaagcgtcagctagaatataaagctaaaaagtttggttgtgaaattataattgctgatagattttatccatcaagtaaaacctgttctcgatgtgggcataaaaaagaaaatctttctttatccgaaagaatttattgctgtgagaactgtggttttgagatagatagggatctaaacgctgcaattaatttatcgcgtttggctaaagcgtgaaagtctaccgagggataactgctcccatgctcccgttgaagtagaaagtaaagtctagttttgtctaggttttatatagcagaaataagtgaacgagttagccgcgaaaaattcaataaatggctggtagaaatgcaagctgatgatattttgcaactgatgacaggagaaataccagattttacccctgataaacgggaagattcaatttctatacctgggacacaactacgttcttatgctaaacgcttgatttaatcaaattatttctaaactttttcgttccttacacctaagaaattatcatgacaaatacccctgtttctgccatagaagctgttaacgccgctatcagaagtgttgaatgttaagaaatctgtgataaaaatagcccaaaatatattaaaatttgagcaagctatatcaaaatattgatttgacatgattataaattcatttcccaagattgtcaaagacatcctcaaatccttgccaaaaaatgattatccggttttgaacacccgtctttacgttgagtgttggttgggttatgccttggataatagt

SEQ ID NO: 128 - DNA, 8331 bp, Sphaerospermopsis sp. LEGE 00249
  LEGE00249_176
gatattgagcatgattttagtgccttaaagagagccagaatgtatgctccttcaaatacacccttagatgaaatcatccgtgattattgtgtatcttaatgtctcattcttaagttaaatgactataactacactcagcactaacttggtaattggtaatgggtaatgggtaattgctaattagtataaattttatattttctgccttctgcctcctgcctcctatatttttaattggtatacatattttgattacagaaagcattatttcacttctactattactgatccaagtaccagcaacggcgctgttattgtcacgtttgctcaagggtcccagaagacatccacctttgcaaccacaacaaccaaccccggatattttgggtagtgtgagtgtggttgttcccactttaaatgaagctttgcgtattagtcccctgttagctgggttaagtcggcaaagctatgaagtccgagaagttattgttgtggatagcagatcccaggatggtactcccgacttggtaaaagctacacaacaaaaagatccccgctttcgcgtgatgaatgatgatcctttacctcctggttgggtgggtcgtccttgggctttacataacggctttttgtttagttccccagacagtgagtggtttttggggatggatgccgatattcaacctcatcccggtttggtcgctagtttggtgaaaacagcccaaacagagggttatgatttggtttccctgtctcctcagtttattctcaagtatcctggtgaatgttggttacaaccggcgttattgatgacgctgttatatagatttgatcctgcgggtattcacactgaacaaccggaaagggtgatggctaacggacagtgttttttatgtcggcgctcggttttagcggctgtagatggttatagcactgctaaaggttctttttgtgatgatgttaccttagcgcgaaatattgcggcggctggttttaaggtggggtttttggatggggctaaagttttcaaagtgcggatgtatgagggagcaaaggaaacttggaaggagtgggggcgcagtttagatttaaaggatgcttctaaccgcgctcaaatttggggtgatttatggttattgtcctctgtacagggtttacccatattgattttactgggctttcttcccctgcttcccctgcttcccctgcctcccctgcttcccctgcgcctgttattggggctgaatatatttttactggtaattcgctttgctttgttattggcgatcgctccttcctacgaccgtaaaaatgctgagggtggttggttgttctggctttctcctttagctgatcccctcgctgtgctgagaatctttttatctgcactccgcaaacccaaggaatggcgggggagaaaatattgagtaggtgacaggtgacaggtgacaggtgacaggtgacaggtgacagaaaagagtttttaccaattacccattacccattacccattaccaattacccattacccattacccattacccattaccatgatttattcattgtcatttaccacttgatcacctctttctagttcccaaagaatttgatttccttcccgtcgtacccgtgaaactatccaatttcgccaacgccattgatctccccgactggtgacagcacttgcatggacatccatcaagtctgctagttcggaactggtgattaaatagcctttttcggcaatttcgtcagcaacccgcaaagtttcaactaggttgcggaggtgtaaaaccctcatctcaggtggtttttcgtcgtttgtggttgcaggtgacgctgtagatggttccatagtggttgtgtctgataaaaaagttctgctttccgaaatgttttctttgatttgtgtagagttgattggagaatcagatacttttgtgaaatttacattgtttgtattggttaaggttgcatcaagattttccggggataattgttgaagagatggaattttgccgctggcaaaggagcgagcaatcacatcacacctttcgttacctatgttaccagaatgtccgcgcacgtgctgccattttacaagtcggctgttgagtctatccagggtttctaacaggtcttggttttggactgggtttccgtctgcttttttccaacctttctttttccaaccctgcatccatttggtaacactgttaatcagatattcgctatcggtgtacagggtgatgggttgggtttgtccagatgtagcaaaaaattctagggcagcgatcgccgcttgcatttccattttattattggtggtatgccgggatgcgtcccccatttcgtaaactgaaccatcattaaagtaaacaacaacaccccaaccaccaggaccagggttgccagtgcaagcaccatcggtatatatgctttgaattatccgttgtgtagacatgatgagtgattaaaaattcaaaattaaaaattaataatgagttgcacacagagattagcaaaaaagggttttataaatcaagtcatcaaacttgcaccctctgtcatcaattatcagtcatcagccaatagtattattagtcaaaatgaagcagttttaatttccagaatgttatttacaatctatttctgttaattaggtttattttatatgtttattttagataactaaaactattctctattccctattccttcttcattattttctaactccacaaaaatactttcaacaatattcccaatttatattaatattttattgtcatttattgtcaaatatcaaacaatgattgaattaactgtagtcaagaaaatcatcatgcaatatctaaacacatttccacaaaggataaagagtattacattagcaatactcttaaccttatttattggtttcatgcttcctgctgttacatgggcaactggtttaggagtgacatcaggttatctgagtccttgtcccaatacaaataactgtgttgtcagtcaaaatgcagatgctaaacacgccattgatccgattatttatcatgtagaccgtgatcaagcaagagaaatcttactgaaagttctcactgttgtaccacgtacagaagttatggaacaaacagataattacattcatgctatttctaaaagtcgcatcttcaaatttgttgatgatgtagagttttatttaccaaatgatgaaccagtaattcatatccgttcagcttctcgtgtgggagagtcggatcttggtgtcaaccgcagacgtatggaacaaattcgtttagctttgcgtgatttaaacatttaattgaaatagaaatcaaatattgattttctagcatcatctattcatcaaattacctttgattgtgaacctgagacaagggagttaacaaaccatcaatactgacaaaatttttctgttgatgatattctttaattccctgttcacctttcttaatagcccagttaactaaagtgtctctttgtctttgatattcataaagtggcacagcaaaaccacaggaagtttgcaccctgtcaatatcagcaacaattatttgccgagttccgttaatcggaggaaataaagaatacaaataatcccattcagcagcattaggtaatattgtttttccctgtccataaagccgcaaaatagaaggtggttcttgaaaagcgcaaaacataaatgtaattctgccattttctaacagatgggcagaagtttcattaccgctacctgtgacatctaaataagcaacccgatggggtgaaagaatacgaaagctgtctaaacctttaggagaaatgttaacatgaccagtaggacttaaaggggcagtcccaacaaaaaacatctgctgatttgcaataaatttttgcaattcttcggtgatagattcaaaaactttagccataaacagtttgatagtttttgcagatttgttattttctaccattcccacaaagcttaacttgtgtttgaaatgtcgtcaatatttttatctccacctctagaaaaaattaatcatcaaatagctgatagtgctggtgttgagttatatgtattccgtcttgatctcatgcacccccaaattaatggtaacaaatggttcaagctgaaatacaatttattagaagctcaggaaaaaaaatactctaccattcttacttttggtggtgcttattctaaccatatttttgctaccgctgccgcaggtaaggtttttggtttgcgtactattggggtgattcgtggagaagaaactttaccactgaatcctaccttaaattttgccatagaacaaggcatggagttagtatattgcgatcgcacaacttacaaaaaacggcacacaaaccaactacaggaagaattaaaacaacgatttggtgaagtattcatcattcccgaaggtggtggtaatttaaatggtgtgcgtggttgtacagaaatcatggaaaacctaaaatatcttgacattgacacaatttgtctcgcctgtggcacaggtacaaccctagctggaattgctttatcattacattcaaatcagaaaattatcggctttcctgtattaaaaggtggagaatttttagcaccacagattacaaatttaacacaagattatattcaatccggtttacctgtaccagttcataatccggcacattggcaattgctatacaattaccatttcggaggttatgcaaaagttaaccaagagttaattaaattttgtcacacattccaacaggaacataatatacccctagattacgtatatacgggaaaaatgttttatggtgtcatggatttattaaaaaagggatttttttcaccaggtaaaatactattaatacatgctggtgggttacaaggaaattctggtatcgaagaaaaattacttaaaaaaatatgaaaaacatatttaattaaaacaaattttttacaactaagatccccgacttcttcaagaagtcggggatctgaaaatcataaagttacaccatgttttttagcaatttcagtaagttgatcatactgatgttgtgctgctttcgttaaaattgtttctgcttctgtgggatcagtaccatctttaggaattaaatacttcacataaagagaaacaaaatcaacaatagctgctaaaccagacaaattatgtttatcagattgttgtccagcaataacagcaactaaaccagcacgaataggatcaggtttcactttcataaactgatcaattagctgttttaaataatctgctgattctaggtttttcaacttagtttgatcaggtttaaattccaatcctgcggctttagactgttctaaaacacaccattctgtaaattcttgcagtgcagcatcagtaagtttagggagatattggtacagttctaaattagacacaaggtgacaccaaattgaggttttttaattgcatcaagtccaccctaacctactgtttgatagagttttgtaatagaactgacaattattaacacgaaatttaaagttttttcagtatttagttgcaataaaaaaatataatttgtaggttgggttgacaataggaaacccaacattgatagactgttgttgggttacgctttctttgtacccaacctacaaaaactcttaaccgagttgatgctactttggttattctttaattttagcgttataatggtagtaaattaagaatctatactctcacaaaaacacattgaaaattaaaacattaaaaagcattcttgaaaaacatgatttgtttttttgaatataaaatccaaaatccaaaatccaaaatccaaaatctaaaataaaatgacttactcaccacctttacccccacaaacagaaccaccccttcccccaagggaaaccttacccacaatgtatgatttaccaagcgaaaaccaggaggaaaaaggtttgccagatgattttcattttttacaaaccttacttttatatttaacttttcaacccttaaactggaatccagaattagtttatagtgctgcggatctcaatctttattatgatctacaacatcctttatggtataaaagaccagattggtttggtgtagttggagtttctaaattatataataatcaagatttacgtttaaattatgtcacttggcaagaaccagctaaaccttttgtggtagttgaattattatcaccggggacagaagaagaagatttaggaactaaagcaagtcaagcagataaaccccctacaaaatgggaagtttacgaacgcatattaaggattccttattatattgtttttagtcgttataccaacgaagtccgcgcatttcagttagtaggtggtcattatgaatcagtaaattttattgatggacgtttaccgatgccagaaataggtttaagtttggggttatgggaagggacatttcgtggtattcctaaactttggttgaggtggtttacattggatggggaattaattcccgaaccttcagaagaagcaaaggcagcgaaaatcaaagccgaaaaattagcagaaaaattgcgtaaattgggtattaatcctgatgaaatcatttaatagcaaataattgctaaatttcgtgctttagggttttaaccagaataaaatagataccgtacttcttcaagaaatccggtatcttgatgtttatttacctaaaaatatttataataatacaataaagtatgggtaattcatgaattacctctacaaaaaccacaccaaaaaataccacaagcgcggggagtatatgacctcgactacagattttactaccactccaattagtctcccagaccatacccaactaccttgtgaagatggtacatttgtgaaaaacttccaggaacacccccaaagcattctactaacagaatcaattaaaccaatattacaaaaaatccatcccgatggacaatattgtataggtcaagatagcggtatttactggcgaattaccgaacctttagaacggggtgcagaagcacctgattggttttatgtgccgaatgttccgcctagtttaaatggacaagtgcgccgttcttatgttttatggcaagagtatatttcaccattaattgtcttagaatttgtgtctggtaatggtgatgaagaaagagataaaacaccctggaaaggtaaattttggatttatgaacaggtgatacatccagctttttatggcatttatgaagtaaataaagctagtgtggaagtttatcatttattggaaaataaataccatttattaccggctaatgaacgcggacattatccaattcccgctttaggagtagagttaggaatatggcaaggtgaatatcaaaatttagatttaccttggttacgttggtgggatctagatggtaatttattattaagtggagaagaacgagcagaacaggaatatcaaagagcagaacaggaatatcaaagagcagaaagggaaagtcaaagggcggaagaggaacgcctaaaaaatgaacgtttaattgctaaattgcgtgctttaggtgttgaaccggactaaactagataagccagataccagacttcttaaagaagtccggtatccaatacttttcagttaagcctaaaaaataaaattctgtaggttgggttgaggaacgttcacgcagtgtgccgaaggcataacccaacatttacagaggtttgttgggtttcactttgttcaacccaacctactaaaatcctgaacctttattaccttgtgccatctgtacacccttataaattccataaccagctaaaccagcagcagctacaataccagcagcaggaagagcaacaacactcgtagtagttaatcctatagcacccaatattcctggtgcagcagttgtaacagtagctactgtgattgaacctaagccggcagcagcagatgaagcagcacctatagcacctatagcctttgcatcttcgctatttgctaaattacctcctgcttgaactatactgtcagcagcttttttcaaatattttcgcatttggattaactccatattagtccataatagacagattatataacttcgctttgttttacgtatttagtaaatatacttaaacatcaaaaatattaaatcactattaaatgcttagttataaaaaaacctctttttttaagaggctgttttcaaagtatttgattatgtgttaaatgttgtcatatccccctaaattatccttaaaaagggggaatttgagtagtttagcccccctttttttagggggggttgggggg

SEQ ID NO: 129 - DNA, 7499 bp, Sphaerospermopsis sp. LEGE 00249
  LEGE00249_193
agacttagctgctggtgaagttgctcctgttgctttgactgctcctgcaatcaacggttaatctgaaactgggtttaataagcttagttaaataagaaaataccctccagaaatggggggtatttttgtttgttttttagtagcaggagcatcagataatgatgaaactatgcttggtggtaatactttaggagttgtggtaggagattacagtccagaaattgaaaaactgcggggttgtccacagatttactttgctcaaggtcattatgcttggggaattttggaagctttagatcactatgactaatatacaattaattcttgtggggtagacatacttcgacacgctcagtacaagtcttgtctgcccttaaacccggatgggctaaaacgtcgatttagtaatgctaggtaatctgtttttaccttgtaggggcgaagcattcggacagaatatgaactggtttcaccgataggttatcacacgaatgcttcgcccttacgattaatgaatcggtgttctagaagcccatcccacaatattagacctctccgaaaaagatgtaggaacaattgatgaattgtccctacgaatgggtttcaagttacgcttatgtaattttcggagatgtctattggataatctatttcttggaagtccctaaaatggcttttttcatcctgttaatcctttaatcctgtacttcgacttacttcgacatagctcgactgcgctcagtaagcagacatcctgattcagacagtttctccaaaactccccaaaaatgtcatcatagtaaagttgagaaaatactggagataaaactacggtttacgcacgtcctttagcccggttaattgaacaactgcaacgccttcccggtgtgggtccaaaatctgcccagcgtctagcgttgcatattttgaagcgtccagaatctgaagtggaagctttagcacaagcattgattaatgctaaaaaacaggtaggtttatgtcaagtctgctttcacctctcatctgaacctgtatgtgatatctgtcgcaacgcgaaccgggataatcaaactatttgtgtagttgcagattcccgtgatgtgatagctttggaaaaaacccgcgagtataaagggaagtatcatgttttgggtggggtaatttcgccgatggatggtattggaccagaacagttgacggttcaagctttggtaaggagagtcagtcaacaaaaaccccaggaagtaattatggctattagtcccagtgtggaaggggaaaccactacattatatataggtcagctactcaaaccatttaccaaggtaacgcgcattgcttttggtttacctgtgggtggtgatttagagtatgctgatgaaattacactggctagggctttggaaggaagaagggaattagattaggagtcaggagaataaataattatcaattatcaattatcaattatcaattactttttttgatgcttatgttgctgttgtaattggtgcattttattaaataaatgccaacaatattcttcaggtagtccacaggtgattgcaccccttagcacaacgttaaaataccaatcattaggtgcaacttcttcttttaatttgttcactactacataagtacgaacattattatatatttgatctttgtggtgaatatctactatttcatgacgatagaattgttgggaaactccttcacgttgatcgagattttcgctgagtctccaaggtaactgataaagtacacctgtgactaaggatgtagaatcattgactacatctaaaaccccacatttacgcaggggggaataaccataaaatctgagtttatattcttttaatatagcaggtccgatgacataagggtatgtattttcaccaagcgatcgctttaaatccactggacacatacaagaaccataggcaaaataataaaatgtcggttctgtctctacctttgcaggattttgaggttgtacccaactatggtttatgtgtccactgtgattactcatattccttctttatatgataatataaaaatggtattacgttaatgatcataaatgatcatattcaatatatttagagttcgtaaatttctaatggtaaattatctgggtccttaaaaaaggtaaatttcttgcctgtaatttcatcaactctgatatgttcaacttcgatattttgaaaagttaaataattcacactttcttcaatattctcaaccgcaaaagcaagatgtcttaaaccacaagcttctggtttactaggtcttgcgggagggttgggaaaggagaataattcaatttgggtatttcctacttttaaatctagtttataagaatttctctctttgcggaaggtttcatgaataatcggaaaaccaagaatgtcaacataaaaatgttttgatttttggtaatctgaacaaatgatagcgatatgatgaacaccggaaattttcatataaattaaacgatagatatatgttttttgtagaagtttagcgcgaccatccccatgccagaaaaaataaccgcagcaaaaccaaaaactctctgaaactctattaccttcgtgttctttgtgtccttcgtggttcgtttctttccagactttgacattggataaaaataaatttacaaatttgggatgctcccagtttagcaatactatgagtaggggtctagcattgctaaacccctacttaattactaccctaaaatcgtctttgatgcaatcctggttttcttgcggtccgcttccgaaagttcttgaccggcttgcagacgagtagcagaagattgcaatacagttgcagcgttagtatcaccaatttgtaaagcagttttcgctgctgtttgcaacattgtgactgcacctgtgcgatcgccttgttctaattttgcctctgcaatctgagtttggcgatatttagctaataccaaaattgactgtgacacctgggtatttaatgctggttggtaagtctgagtaatattagcatatatcggcatcaggggagaaagtaaactctcttttttctgtgctggatcatcgtagcgaatctgaatatgtccaatgacttgttcaccttctggcaattgtcccaaataaatattccccaaaactaccctttctacatctttcattaaatcacccaaacgaatcacaaagctaccattagcttctgtttccactggtaactcaatggtttctggggcaacttgggcgactggtttgagttctgctaaccgcacaccaggaacgagagacagcaataaatgggcattggttaagcccacagattgaatgcgtttaaacaagcgtttaaactggtccacagcttggttaggagtctcaatataagcgagagtaccaccaccagcatcggcgattttttctagtaagtcctggttccagtcatcaccaaaaccaaaggtgttaatggtgatatttaatctggtggctttttgtgctagttgcaaacaacggttgttgtcatttgatcctatctgccatttccagatttttaacccgttatcaccatgaccatctgtgagtagaaaagcttgggaaacagcaccttttgttcctttgagcaattctgtaattcccaaagataaaccttcaccaataatagtaccgcctccagctttcagacttttgtgtaactgggttttgatggttttgaggtcttgaacgatttggttagggataatgacctcagcagtacccgcaaaagccacaattgagatcctgtctccaggtttgagttgatctaataattgttccactgcctgaatcactgtgttcatagcttcgccgtgcatagaaccgcttttatcgagaatcaggcataaattcacgggtatactagaatcaagctcatcagcaatagccgaaatggaaatttctagttgacgctggttagtagtttgggttgcgtcaacgttagtatcatttagtgccgataataatttaactttcatgtaggaggagcatcctgcaacacagtttttgagacaattctggttttcttgcgatcgctctctgataaatcttcacctgcttgtaaacgagtagctgaagtttgcaacaccgtcgctgcactagcgtcacccatttgtaaagctgttttggcggcggtttggagcatggtggccgccccagcgcgatcgccttgctgtaattttgcttccgctaactgggtttggcgatacttggctaaagctaagattgactgctgcacctggggattggtactcggttggtaagtgcgatctacattcacataaactggcatattgagggaaaataaaccagcttgatccagtgcgggatcatcgtagcgtacttgcacattagcgatcgcctgtctaccttctggcaactgtcccaaataaatattagccaaaatcacccgttccacatctttcattaaatcccctaatctcactgtaaaccgtccatctggttctgtttgtacaggtaattcaattgtctctggggcgacttgagctacaggttttaattctgctaatctcacattcggcatcagggaaaataacaggtaagcgttagttaaacctactgtttgcatccgagtaaacaaactattaaacttatccaccgcttgttcagggcgttcaatatgtgacaaacttcctaacgctgcatccgcaattttctctaaaatatcctgattccaattgtctccaaaccctaacgtatttaaggttaaattatagtcagacgctaattgagcaaatttcaagcagcgattattatcaccatgttcattttccccatctgtcagtaaaaaagcttgggaaacagtatcttttttaccctttgctaactcttctattcccaaacgtaacccttcatcaattgcagtacccccatccgcagaaagacgattaatttgctgtttgatgtaatctcgctctgcaattacctgattaggtactaaaaccttggcacgatggtcaaaaaccacaatactcagtctatcctgctcactgagacggtcaaccaacaaacaagccgcctttttcacattatccagcgatcgcccccgcatcgaaccactatgatctaatattaaacatagatttaatggcacactgcgatctaaagtttccccaatcgccgaaatcgaaaacgctaactgacgttgactactaggttgattcgcgtctacacaagcatcatttaaatgaggttgcaagttaactttcataaattcaattttcctaacgacattatctatatctatttataaataacttcaatctccagttaacagagtacggaaaacagataaaggaggcaggaagcaggaaggtttacctcgtctctcgtctctcgtttctctcgttcccagtctctgactggaaatgtgaacatagaggttctacctctcacccaacaccttaacaattcttaactctattttcccccaaaaatcccaaaaaagtttcagcacctttttttacccctaaattattgagaacggttgcgaatgactcaacgtattttcaagggtcttgacttctgagagggttgtgttatgataggttttagaataatccaagggagtcgtatcgtctaaatcaggatatccaggattaccggatttacaggataaaaacgcaaataaacgcagatgatctgaatcacgatttagatgatttaagaatttctaggatacgatttaatgatggttggttatttttgaaggctttttttctcagaatcaggataaccaggattataggatttacaggatgttatttaatgatggttcgttacgcacaagttatggaaggaacgaaccgcaaagaacgcaaagtacacaaaggtaaaaggtttcagagagatttgaaaatttcatcctgttcatcctgttcatcctttaatcctggacatcttcaccacatctgtgatattttaaagtcaaaatcatatactgagtctataaacaccaaactaaaatcctatcctgttcatcttttaatcctggacatcctgattcagacgaaaatctatttcccgcaaaggcacaaaggagcaaaggcgcaaagaagatatcctgtacatccttgaatcttagttttaacaatctgcgtctatccgcgttcctatcctataaatccctaaatcctgatgcggacaaatattgacatctcataaatatatatgatatgttaaaacttaagtaactcaaatcatataacatcaaaccaaaatcctatcctgttcatcctttaatcctggacatcctgatttagacatattaaaaaccgtaaaaaaaattgatcgcctgacggcgaggaagaagggaaaaaagaaaaagtgtagagggtaaaagggtaagagagtaaagaactaaagagtccttgcgccggaaactaccaaccgaaacccgaggctgttgtaactgtagtctgggctgaagttgtcacgaaacgcagaacggcaatagctggggttgagatcccaagaaccaccgcgcagcatcttatattcgctttgacttgtcacagcactgctatctataggcgcgttattatagttatcaacataatcatccaaacaccattccttgacattcccgtgcatatcgtacaaaccaaaggcgttagggggaaaagaacctacatctgtagttcgtttacgatactcaccttcaggagcattagcgtaggagtaattaccattatggtttaccagatcagtggtaatactttcaccaaaataaaatggtgtggtagttccggctctacaagcatactcccattgtgcttcacttggtaatgtgtagttttttcctgttttttggcttaacctttgacagaaattaaccgcatcattccaacttactctttctacaggacgttggttggtgagggtggttgaaccatcgcctttaaagcgagaagtgttatctcccataatagcttgatactgtgcttgtgtcaatggatatttacctatgaagaaactgggaacagttacttgacgttggggaccttcatttgatgctctatctttctcagtttccggtgaacccatgaggaatgttccccctggtatttccaccatttctaaagtcacaccatttcccaaatattcggtaaaatatcgcgctgaggagttgcgtcggttgatgatgcttccggtggagtcggtggtgacaacttcaaaattaaaggttgagagggagtttgaagaagtttgattttcagaagtttgatttttaggacctgagaataataaattttgtcctacaacagcaatagtcacaccaccaacaaataagctgggataaaccaagaaatttctccgggtgataattgtaggttgaggagatcgattttgagaagattgagaagattgattttgagaagattgattttgagaacttcccaatttttgagaaattggaggttggggtggttggggtgg

SEQ ID NO: 130 - DNA, 7234 bp, Sphaerospermopsis sp. LEGE 00249
  LEGE00249_200
cccaatcacctgtcacctgtcacctgtcacctgtcacctgtcacctgtcacctgtcacctgtcatctgtcacctgtcacctgtcacctgtcacctgtcacctgtcccctaatctaaaatccaaaatctaaaatctaaaatccttatggtcagtctgttagaaaatcccttgcgggttggtctccaacaacaagggatggccgaaccccaaattattgttatctttggcgcgtcaggtgatttaacctggcgtaaactcgtacctgcattatttaaactccgtcgggaaagacgcattcctccagaaactaccattgttggtgtcgcccgtcgtgactggacccatgactacttccgggaacagatggaaaaaggaatgcgggaagctcacagcaaagtcgaactgggagaactctggcaagacttttccaagggtttattttactgttccggtgatattgacaaccccgaaagctatcaaaaactgaaaaacttcctcgctgaactcgacacccaacggggaacacggggaaatcggatgttttacctttctgttgcgcccaacttcttccccgaagctattaagcagctaggaggggcaggaatgttagaagaccccgacaaacaccgtctcgtcattgaaaaaccctttgggcgtgatttagcttccgcgcaaagccttaaccaagtagtgcagaaggtttgtaaagaaaaccaagtttaccgcattgaccactacttaggtaaggaaacagtacaaaacctgttagtgttccgctttgccaatgccatttttgaaccattatggaatcggcaatttgtggatcacgtacaaatcaccgttgctgaaaccgtaggtgtagaagaccgggcgggatattatgaaagtgccggtgcgctacgagatatgctgcaaaaccacctcatgcagttgtattgtttaaccgcaatggaagcacccaacgcgatggatgctgacagtattcgtacagaaaaggtgaaagttttacaagccactcgtttagcagatgtgaataacctttcccgttctgccattcgcggacaatatagcgccggttggatgaaaggagaaaaagtccctggatatcgagaagaaccgggagttgatcccaattccaccacacccacttatgtagcaatgaaatttgtggtggataactggcgttggcaaggtgtacctttctatctgcggacagggaaacggatgccgaaaaaagtcagtgaaatttccatccatttccgggaagtaccttccagaatgttcccatcagccgcattacaagcaaacgccaatattttgacaatgcggatacaaccaaatgaaggtatttcgctccgttttgatgtgaaaatgcccggtggagacttccgcacccgttccgtggatatggactttacttatggttcatttgggattgaggccacatctgatgcgtatgatcgcctgtttttagattgtatgatgggcgaccaaacattgtttacccggtctgacgaagtagaagctgcttggcgtgtagtgacacctgcgctgtctgtttgggacttacccgcagatcccgctactgttcctcagtatgaagcgggtacttgggaaccagcagaagctgaattattaatcaaccaagacggccgccgttggcgcagactttaaggggtgactggggactggggactggggactggtgactgggtaagagtttttcccaatgccccatgccccatccccaattattaatccgaaatccaaaatccaaaatccaaaatctaaaatccaaaattgactatggtaactgaagcttctacaatttattctctccaagcccctaaagatgtgtgtttgactgatattgaaaacgaactcagtcaaatttggcaaagttatggtattcaaggggaagaaggcggtttacctgctgctacccgtgctgcaacatttactctagtggtttatgaaccagaagaaacccagtatttgttagccgctattggtgtttataacggtcctattgatgggattttgggaccccaaacccaaacttcactgcgggaactacagaaaaaacacggacttccagaaagcggtattcccacaccggaaacgatcaaggttttacgggaagaatattttaaacttcagcacagtggggaacatggtgatagtcatggtgcggcgatgggctatacttacagtcccaccagtcccactattgctgatgaaattgctttgcgtaacccttgccggatcattgctttatgtcccattgcgggggaagatgaaggggtaaaggcgcaggtttctgcctattgtcctattcaaaagcagtcttctagtacattaatttgttgtgaatacattaccttaactggtactgctgccgctttggaacgtattgggggcatgattcccgctttgttaattggtggtttgcctaagtttttatggtggaaagctactcctgattctcaaaatcctttgtttaagagattggcggctgtttgtaataatgtgattgttgattcttgtaattttaattctcctgaaagtgatttattaactttgcaagatttggcagatacaggagttcctttagctgatttaaattggcgacgtttatctgcatggcaagaattaacagcagaagcttatgatgctcctgtgcgtcgtgcagctttgagagaaattgatcgggtaaatattgattatgaaaaaggcaatgctgcccaagctttattatttttaggctggttagcgagtcgcttggaatggcaacctgtttcttacagcaaagaatttggtgattatgatattaccaatattgtttttgtgtcgaaagatcaaagacaaattaatgcagagttagcaggtgttcctgttgctgatattggggaaattgttggtgatttgattgctttgcgtttgagttctactaatcctcaagctaattgtggtacggtaatttgttctgaaaccggcggttgtatgcggatggaaactcaaggtggcgctcaatctgctggtttatttcaacaagttagttctcttgctgaacaaaagccggagtttttgttaagtcagcaggtacaacgttgggggcgtgaggctttgtttgaggaaagtttatcggtgattacgaaaactattaagttgggttagttttcatctcgttcctagtctctgactaggaatgcttttttgaggctctgccttttttttgtctgaatcaggatgtccaggatttaaggattttcaggattatatttttattgaaccacgttcgcgaagcgtgccgaaggcatagacacgaaggacacgaaggaagagaggaagagaagaagagaaatttttagatatatgcaccacttttttacttctgactcctgactcctgactcctgactcctgactcctgactcctgactcctgactcctatgccctcacggaaagactttctcagcaacccctaactattctcgcttgggcagctacggaaaatcgagttctcttaactcatgatgtggctacaattacgcgctatgcttatgaaagaataacagcaggtgagatgatgccaggggtgattgaggtttctacagatgctagaattggacaggtaatagatgatattttgttgttaattgattgttgttttgatggagagttagcaggacaaatatattatttgccattttgatgatttagattctcgacttcttactatgatctatttttgttggtggggtttataaaggaagtcggggatctttttttgtctgaatcaggatgtccaggatttaaggattttcaggatgatttttttattgaaccacgttcgcgaagcgtgccgaaggcataggcacgaagaacacgaataaagagaggaagaagagtgttttttagagaaatgcaccacttttttaatctcacgcaaaggcgcaaaggcgcaaaggaattagaaaaagtttaagggtgtggtgcaagtatctaaaagttgctgtaattttctggttaagaagttaagctacgttttttattgatacaattccttcactgcaccactgtactaatagccagcgatctgagtctttgtctaatgctggtttgagtcgaaaggcaaaaaattcttcccatgcttctatgctgtgtcgtgagacaaattgttgctcgatttctttaaatttttcccagttgcgttctgctatggctgttagcatggggattaattctgtgattgatatggaatgtgtagttttactcatctgggtgtccttcaaagatacagattattggcaaaacagaggcttgagtatcaatgacttcgactaaccgaagtcccatttttttacctattttcttgcagcgttcctcggatgcaactggtagccaataccttgactcttttacagggtcaaattcgcccttggaacgtttgattttatcctccatctctgagaatgccttttttagttgttgcgttggcttttggcgatcgctaatttggcttatctgatttggtttttgtttgcactgcgtttttgcagatggactctacaaggttgcttaaagtccggttttcctcttcagcccatttttctagcgattcttttagggattgatcacatataaatgcgattctgggtcgtctagccaccatcgttaacactttttataactgtatatccagcatactccagagaataactgtgttgttaggtgggtaatactgttatcagatatttgacaggtgttgacgctgtatgacaatgtggctactatagcatcatttttcccatacaagtcaagtggtgatagaaaaaaccttcaatctcgatgggtgaaggtatcaaaatcgttaggaattttgttctgaaactgtgccttttttatttttggagaaggcatagtgttaagtaggattgactatatgtcaatatatccccaacttctcaaagaaatcggggatttaaaaattgcctctttgcgtctttgcgtctttgcgtgaggtatattcaaacctcatacgggttaacccccaactcccgcaaccgttccgctaaacgtgcggctttttgctgttcctgctccaactgagatgttaattgctgtgtcttttccccactatgtaacaacaaattcccctgtaaatcccaccaacgcaaccagggagcttgcatattattatacattccttcccaaattcccaactctacacctagcggtaaaattggataatgccccctttcattagctggtaataattcgtaacgtccattcactaaatgatacactttcacactggctttctggacttcataaataccataaaacggtactctaattgcttgttcatacacccaaaacttaccattaaacggtgttttatccctttcttctgcaccatccccagatacaaattctaaaactattaaaggtgctatatattcctgccacaatacgtaggaacggcggaatttaccgtttaacattggtggtacattagctacataaaaccaatctggtgcttccgcgcctttttccagtggttcggttaaacgccaataaataccgcagtcttgaccgatcgcatattgtccatcaggatgtattttttgcaaggtgctattgatggagtctgttagtaagatgctttggggatgttcttgaaaattttgacctacggtacgcttcgctaacacaaatgttccatccgactctggtaactccgtgtggtcgggaagatgggtaatatctatgtcagcaggtttcgcaagagtcatagaactgggttttgggtttaaagactcgatcgcctctattgtagttatattatagttaaatattatgacattgatgggcgatcgcctttttttaggatggcgcgtgataactgatagcggacaactgacaactgataactgaaaactaaacctttggttccaaagacttcagcaactcagtattaacaccagattcacgagttaaagaaatcttacccgtgcgggcaatttcccgtaaaccaaacttttgcaacacctgaacgatcgccaccatcttccccggatctcccaccacttccaaagtcagagaatcttccgctacatccacaaccctagcgcggaaaatctgcgccagttctaccacctcagaacggttgttgctggtagcattcacctttaacagcatcaattccctttctacacaaggtgtctcagtaacatcctgtactttcaggacattaactaatttatataactgctttgtgagttgttcaatcacgcgatcgtcaccaggtacaaccatcgtaattcgggaaactccaccctgttcagcaggaccgacagcaaggctttctatattaaagccacgacgggcaaataaactagaaatacgggacaaaacccccgcttcatcttcaacaagtacagaaagagtatgtttcatcttcgccaacacaggctagggagtataaagagataaatgtaacatcagccatatctcagggctgctttagactgactacgaaataaaattttcggtctaaacccttattttaatacgcttgtgactcctatctaaatcaggatttccaggatttaaaagtgattttttctcgttcccatactctgtatgggaatgaatgtaagaaggctctgccttctattaaatcagagtcagagactcaaaaacagcattcccagtctgagactgggaacgagattaaacgagattaaaactactgcaaatcctagcagagatagatgttactggttttttaaagttttatactgatatgtgagaaccactttaccaggagaaaatcgtttatgagttggttaaaaagactgtttggaatggaaaaaccagaaaacgcaaaagtaaacccaactccacaagcagcagctaccgctgacaaaatccctacagaacgtataggattaaatggcgaatatgatcaaagcggtttagctaaaagagtcgcattagcctttgatcaagattcagaacttgcaaattgcgatcgcctgtgggtagctcaactaggtagcaccgtggtattaaaaggtgaagttcccagtcagaaaattctcaacaaaatggtttctgtcgctcgttccgttaatggtgctactaatgtaacgtctgagcaagttaaagttgggtgattggtgattggtgattggtgactggtgactggggactggggactggggac

SEQ ID NO: 131 - DNA, 6983 bp, Sphaerospermopsis sp. LEGE 00249
  LEGE00249_211
gaactgcttgcagcagcgcttcgctatcgctacctaaactttagaccattttgtattaaaattatcctcaaaggtcttcaaaaatccgaaattaccgattgtgacactggggggtgcggaatgtgggtttgatatctctgggttttacatttattcagcatcccctaaattaatgtcagaagtcggggatctttgagttatgctatactaacttaaacgtagtcgttatgagtttgtataatagtatgacaaattccccagtagaaaaccccaaagtagaaaacctagtcattatcggttctggtcccgctggttacaccgcagctatctatgcaggaagggcaaatttaaaacccttagtatttgaaggtttccaagcaggtggtttacccggtgggcaactgatgacaaccaccgaagttgagaacttcccagggtttccccaaggtatcaccggaccagacttgatggataacatgaaagcccaagcagaacggtggggcgcagaattatatactgaagatgtgatatcagttgatttgagtcaacgtccttttactatccgttcccaagaaagggaagtaaaagcccatagtttaattatcgctaccggtgcaacagctaaacgtttaggtttacccagtgaacatcaattttggagtcggggaatttccgcttgtgctatatgtgatggtgcaactcctctatttcgtaatacggagttagggattattggtgcgggagactcagcagcagaagaagctatttatttaactaaatatgcttctttggtgcatttgttagtgcgttctgataaaatgcgggcttctaaagctatgcaagacagagttttgagtaacccgaaaattaaaatacattggcacaccgaagcagtagatgtaattggtgaagaaagtataaatggtgtgcaagtgcgtaataatcaaaccggggaagaaagcactattcccgctaaaggtttattttacgccattggtcacaagcccaatacagagttatttcagggacaattagaactggatgaggtggggtacataaccactaaacatggtggattagagactagcttagagggtgtatttgcagccggtgacgtgcaagaccatgaatttagacaagcgattacagcagcaggtactggttgtatggcggccatgttagcggaaagatggttatcatcaaagaatttaattcatgaatttcatcaaacccaaattgaaggaacaacaccccacccagaaaccgagaaagcagaaacagaagcggaatttaatttgcaagcaacacgccataatgggggttatgctttaagaaaattattccatgagagcgatcgcgtgttgttggtaaaatatgtttctcctggttgtggtccttgtcacaccttgaaaccaatcttaaataaagtcgtcgatgaatttgatggtaagattcactttgtagaaattgacattgaccaagatcgagacatagcagaaaatgccggcatcataggaacaccgacagtacagatatttaagaataaggaattggtaaaagaagtgaaaggtgtaaaacagaaaagtgaatatcgacagatgatagaaagtaatttgtagggacaggggacaggggactggtgactggtgactgggttaagattaataacccaattaccaatcaccaattaccaattaccaattaccaattaccaatcaccaaacaaacaatatgataactattcaaaccaaagaatctaaattatgattcaaactttacctgaaactaaattagttacttttgcagagtttatcgagtggtatccagatacaggattacgctatgaattacatgatggagtaattatagaaatgacaccacccgtaggagaacatgaagaaattattggctttttagttgaagaaatagtcacagaatataaacgtctaaaacttccttatttcattcctaaaacagcttttatcaaaccaccagaaaaagaatcaggatacttaccagatataatattgttaaatcgttctaatttaattaatgaacctttatggaaaaaatcatctacaattagtgaatcagcttcaattcctttagtagttgaagttgtcagtacaaactggcgtgatgattaccataaaaaacttgctgactatgaagaaatgggtattgtggaatattggattgtagattatgctgctttaggtggtagagtatttattggcaatcctaaacaaccaactatttcactttatcaactgatagaaggagaatatcaagttagtcaatttagagatgatgatttaataatatcaccaactttcccagagttaaaattaactgctaatcaaatttttcaagctagtttgtaagagtgtagattataatataattttcatataattttcatgcaagtataatgtaaatattcagccgtcatcaggagtcaaaaccatgcaagaacaaataaccgagtatcaacaagaactaacagaacgtatttccacattagtggataaattatttcaaggaagtagtttctacaaagtcaaattagaccaatatgaaatgaccgaaatgctgatagaattatttggtagattgtcaccagaggaaatgagagcaattaaagaacatgatttaaccagaagaattgataaaattcttgtattagaagctgttgcagggacattgaacgacttatcacccgaagaaatagcgatttttgatgcagcggtagaaggaaaataacactgtgaattatttactagattcaaatatcgttagttacattttaaaaaagaatgcaactgtaaataagaaactccgacaagtcaatagtcaaggaggaaagatatttattagttgcattacttactatgaaataaaaagagggcttttatccattaatgctgtcaaacaattaggtgagtttcatgtattttttcaaaaatatcaaacattatttttagaggatttagaaatcattgaaaaatcctgtgaaattcacgctaagttaaaaaaacaaggtacacctattcaagatgcagacgttttaatagcagcaacagcaattatcttagatttaattcttgtttctaatgattccgatttatccagaattgaaggacttaaattagaaaattggttattgtaaaaaattggttattgtaatatataatttatatttttacagccgtttcctaagttatgaggtacaaggttaacaggcaagatgcctgttccacaagggttagaaaaaaattaccatcataattatattaccatgactattacaaaaagccgcataccaagatttttaaactttgctaaatctaacctatcccagcgatttatgttgataggtttagcaatgactttattttttatctttttagccttttttgccccagttttccaacagtggggatggttacaaaaccccaaagaatttttaagtaaccctattcatgacgcaccttcccttaaacattggtttggtacaagtcgcttgggttatgatgtcttttccagaacaatttttggcgcacaagcagcactgcaagtagtgattttagccactgcattaagtatggttgtgggtgtacccttgggaatggtaagtggttatttaggaggaaaattagataaaactttactatttctcatggatagcatttacactttaccgggtttgctgctatctgttaccttagcttttgtggtagggagaggaatattaaatgcggcgatcgccattagtattgcttacattccccaatattatcgcgttgtgcgtaaccacaccgtcagcgttaaaaccgaagtctacatcgaagcagcgcaagcaatgggcgcttctacctggattgtattatcaagatatctatttttcaacgttattcaaagtgtccccgtcctctttacccttaacgcagcagatgccatattagtattaggtggtttaggttttttgggtttaggactacccgaagatgtacccgaatggggttatgatttaaaacaagctctggaagcactacctacaggtatttggtggaccactctttttcccggtttagcaatgactatcatggtagtagggttatcactacttggggaagggttgaatgagtttgtcaatcctcgtttgagaagagaaaatagatgactggtgactggtgactggtgactggtgactgggtgagaaaaactaagtctttctcctgactcttgataactaacaacaaaactgagatacttctgtgaacgataaatttactttaattgcagctgctaccggtggattaatgctttccgttgctttatctggtatattaaaaggcgcaccgctgataacttcggaaaaatctcatattaagtcttacactgttgctaatgtgcagattcttactaaaaagaattaattcctaatccatactaaccatcgttcctgtacaacttgctcccgtagaagttaaactaggagcagtaataggattattagctaatgttcctgcggtttgacaagcaacagctaaagtaagtccactggaaagaacagttacaccaccattaaaacctttaagcgcagcagcgtcattagctactgctgtaatcgtagtagtattaatatctgctgtaatgttataattgtaattattggttacagtaggaatacccagttgtaaagtctctatatccccagcgaaagctgaattttccattctgtaagcttgttgcgctctattaaatgcgcctacataagttttagcttctgattgttgtgcttttgcagcttgacttaggaaggaaggaagagcgatcgctgatagaataccaatcagaataaatacaattaacaattcaataatcgtaaaacctgcattatcttgatttttgatcagtagatgctgcatcaacttagcttttatggttagtttcatagtggtttctttggggatgagagaatttttgttacctctatgaataaattacccaatttaaattatttttgtatacataacccaaattgctagttatgaggaagagcgatagctacgctgcacttcgtgaacgccaggggggaatttgtgaaggcagtgggtgaataaagtaataaaatcccctccagtcagaaaaaaaggaggggtgtatgttaaaagaaataattgccatctatgctatcacagatgacttattgaaagcgattggacatgaagaagatagtcgtagagtcatgagtgatgcagaaattatcacaacggctatatgtgcagcgatgttctttaatggcaaccatagtaaggcttgtacttacatgaaagaacatggtttgattccaaatatgttagataaatcacgatttaacaggagattgcacggagtttttatgttaatgaacgatttatttcatcaaatgggaatgatactgaaagaaattagtgatgatattgagtatcttttagactcatttccagtacctatgtgtgataatatccgcatttttaatgtcaagttaattgagtcagaaaagtaccggggttacatggcatcgaaaaaaagatacttctatgctgtgcgagtccaattattaacaactaaaacgggaattcctgtggaatttgtatttttacctgggagtgccaatgatgtacgtgggttaaatgccttacccctaaatttacccccagggagcgaaatttatggcgatgcagcttacacagattacaccattgaagatgacctagaacacacgagtcaaattagtttgaaagtgatgcggaaacaaaaatctaaacgtccagatcctccttggattcaatatataaaacaacatactcgtcattatattgaaaccgtatttagttcaattacaattgattttcccaaatccattcatgctgtcacctatcaagggtttttactgaaagttcaggcatttatttttgccttcactctgcaagaagcatttatctaatcagttactattcatacttttaatttcattattactgaccgtcgcttctgcattccaggagtcaatttttgatgactttctttccatttgaatctctaccggctacttgggttattactttattgacccatttatttcccaaacttcaccctagcgttcacgaagtgcagcgtagctatcgctcttcctcataactagcaacttgggttagtaaaggttttggtaagtaattagctccgaaaacggtattgcatcaacttagaaagttttacatttttgaggtcatcaaaatagtaatattctcctcgcatttttacattttgactcaggctaactggaggcatatttaccgctaaatgagtgcttgaactagaatccgcattaaggggtctaagtcatcaggaacacgataactatcaagtccttgaatgagatgtttattaatgcgatctagttgagcaaattcccagattttgccagtggtaactgaaccaataatgtgagtttgttgtggattttcttgccattgatctagggcgattaattctgcaaaaagttgtgtcataccataatctaaatcttcttttttagcttcaattactaagaggttatggcgatttttgatgagataatcaaagtaaccttgtagttgttcactgactttaatttgatattcaattctcacctatgattttgtatagtgaactaagtctaaaatgatgggagaaattaatacttctctgcgacttgtttcattagctaaatcaaagtatgggagaatttcatcaagtctttcttgcagttctgttaatcggtctaggttgtgttgatattggggtaaattcaaacgttttcgagtgaatgtatagtagtttaacttaagaatgagacaaaaagagtataagattgaagagagaaggtatgggagtagaaatcatggcttatagtttagatttaagacaaaaagtaatagattatatagaaaatggtg

SEQ ID NO: 132 - DNA, 6690 bp, Sphaerospermopsis sp. LEGE 00249
  LEGE00249_222
tattccctgttccctgttccctattccctattccctattccctattccctattccctattccctattccctattccctattccctattccctattccctattccctattccctattccctattccctattccctattccctattccctattccctattccctgcctctacgaaaaattcataaatcaaaccggattgctatatatgaacattgtcatagatgctctgcccattaatcatatgtcaggtagacacgtcatttctgggcatttacgaatgttggccaagtatcatggcgatcgccatcaattttttgttctacatcaccacaacaatcgggatctttgttgcgacctaggatcgagttttcactggatagagtgtcctaactttggtgaaaactggtcggctcgactttggtggcaatttactcagttagagtccctcctgacccaactaaaagctcaactaattatttcaacctccggcgctctggttcccggaactaaattaccccaagtggtgattgcccagaatccctggtgttatgttagggaatttcactacacaattggcgatcgcctgaaggcctggctgcaaagacagggctacaaacaagcccaaaaaaaagcacaggccatgttttttaattccacatatctgggaaatttgtatctggaacaaacgggcattcagcccaaccggagctatattttatacaatggaatagatgatgatttttttgaaaatgcaacagagcaatatttagcatttaaaaaccgcgagttaacaattttaacggtttcagtcatgacaccgcataaaaaaattgaagaacttatcagtatgctagatattgttatacaacaaggcttctctgtaaagttaatcatcgtcggtccatggagtaacacatcctataaactgcaaattgaaaagttaattcaagatttcaagttgcataattatgtcacaataacggacaaagtatcgagggagaaactgcaggaattttatcaaaaatctcgagttttctgcttgtttagtcgctgtgaatcctttgggattccggcaattgaagcccaaacatacggcacaccaacaattgttgcagatttttgcgctcccccagaagttgctggacctggtggtataatcatcaactcccttaatatcatacaagaaactaataaaattatcaaattattaacagattcagccgaatgggaattatattcaagaaatgcttttaataatgcagatagatttcgctggaataaggtgacattgcccctaattaattttattagtgaatttagttcccatgaaaagtctaatggttgatttgcaaaataaattactatctacaatcacaagagaaacaagtggaagacaattttttcccgtaattgacggattgcgttttgttgctattttgggtgttgttctctatcatattcaagactatttttttactaaaactggagaacaaaacacatcattatttttagtccccttactaaaaggaggttatctaggggtgcaattattttttgccattagtggttttatgatatcactgccatttttacaaggatattccccaaatttttttcaatatataaaacggcgtctcctgcgtttaggacttccatatattattaacttgttgatcatatacaccttgttagtattggttttaaagcaagatttttatgaactgttgcctcattttttcgccagtgttgcctacatgcacaatattatatacggcagcatgagcaaaattaattttgttgcttggtctcttgaggtggaatttcagttttatttaatagcaccgattttcttaattgcgttaacaaaaatcaacaataaaattcgtaaatttgtcctattatttttactggttttaggaggtatttctgcgtcaggatacatcagttacccctggataaagggagcaacaattatccataactttgggtttttcatagctggaatacttgcagcaaatatttttgtgtttgactggaaaacctcagttaaacaaagttatttctgggatttgatgtgcatcatattagtgagttttctatttttcccacttcatagccgaacattattgatgggtttggatgaaaaactgtatttacccattttgacctatattattttgatctcagttttaaaatcaaagttgattaactcagcactcagtcagccctatatttatttaatagggggaatgtgttactcgatttacttgtatcatttttacgtcatctctttagttggtcgagtgctacttcccttagtggaatcactacctgtgtggttacaatttaccattgtagtggtagtaatgttgccaaccattttattagctagtgtactattttttattttttttgaaaagccattcatgaaacgaaagactcatgttgcaataacaaaggatagaacagacgagaaaccttgcatctaattgacttaatcccgcctcactttttcatcaaaccctacgtaaattatgcctattaaagtcggtattctcaccactcacccaattcaatatcaagtaccctggtttcgcctattagcccagaacgccgacattgatctgcacgtctttttctctatgattcccaatgctatgcagcagggagatggatttggggtggcttttgagtgggatattcctttattgaatggctatgaatatcaagttttaacaaatattgcccaaacaccatctgtaaccaactttgggggctgtgataccccagaaatttttgccctcgtcaaaaacggcaattgggatgtttttatcgtcaatggttgggttgttaaaagctgcctacaactcctggtagcttgccggttctatggcattccctgtattgtccggggggaatctaatcatcttgcccatagggcatggtggaaaaaacaactgcaacggctattaattagtcagtatagtgcctgtttgtatattggaaaagctaaccaacagttttatctcaacaatggtgtagcaccagaaaaactattttctaccccctattgtatagacaacgaaagatttaccgcccataccagtcagatccttagtgaaaaatcctctcttctagaaaaattccgcttagacccccacaccgtcaccttcctttactgtgctaagtttattcctaaaaaacatcccctagatttactccaggcgatcgccctattacaacaaaaccatcaacccacagggcaactactgatggtgggagacggggaattacgccctatctgtgaacaatttgtccgcgatcaccaactaccagttaggtttgccgggtttctcaaccagagtgaaatcattactgcttacctggtgtccgactgtctcgtcctcccctctgatgccggtgaaacctgggggctagtggtcaatgaagccatggcctgtggactaccagcaattgtttccgatcaagtgggatgccattttgacctgattgcaccggaaaccggttggacttaccccatgggacaaatagacaagttaggcgatcgcctagccacagcgctcaaactaggtcaagcaaagctggctgagatgggaaataacgcccagagaaaagtgatgatggaatataattaccaaaaagtagtctgtggtattacagaagccatgcgttatgtgcggagttaactgttaccagcaacaatggaaagtgatttatggcatctggtatagtattactgatttcagttttaggggcgattctcgccctacgcaattggcggcaggggatatactggctagtatttctagcagcagtacaagaccccctgagaaaaatgatccccggataccccgccagtgtcctgttagcaagtgtgccaattatattaagtataatcctggggttgtcgggacaaaaagactggttgcattcattctggcgaatgtatcccaatgtgaaccgcagttttaactggtttgcgctggcttgcatccccccagccttgatttctctgacctatagttccaactcctggctcatgacagtctttggcatctttaactatggcgttttcttggcggcgattttagtgggttttcactttgcccaatctctagaagatatccaaagactatttagtttttattgtctcctctccgtggtcatgctgagtggcacatttttagaatactttaacgtcgtacctggatggactcttataggtaccagtgccttagactttgattgggtgcgacatagtactggctacgttgtcaagctgatagcaggtttttaccgttccccagatgtcatgggctggcacgcttcaacaacttctatgttcagtttttttctgtgcaccacctcgaaaccgaggcaacgctacctctggttagctatttgtgtcatagcgatcgccgccctgtttttctgtggtcgtcgcaagatgctttatatgttgcccgtagcggcaatagtttttactttgatctatgcccaagcccgtggagggcggatcttttccgttttgcccgttctactgattccactgctaattatgatatatattggcaacaatctgggagaagattccacctacgtcagatattaccaagatcattttgctgttgcgggtgaagaccttcgacgacataattttgatgccttgattgaaacagtgcgtcagtcgggattttttggagccggtctgggatcagcttccccaggaagccagaatcttgccattttcaatgtccaaagaccgagaacttggcaagaaagtggcaccagtaggatgatggtcgaattgggagtaccgggttttatagccttagtcctgctgctgctcagtttagtcctttcagcatgggtacaagtgcagtccctattcaagtcgcaaatgtacttaggggtttacacaggtggaattttagcctttttcctggcaaacattggtagtttgatggtatctgggcaaatattggcagacccatttattactttttttattgctttctccctggggttagtattgtccttcgccaagtattggcaagcttttttttggcatcaaacccagaatataacccaaaatataaccataggaaactctgaaattgaccgataagaccgaactaatggctggatttttaccttttcttcacgataatcaaggtgtgttagaagtagcattaatcaccacttgttccactgagtctgtaggcagtatgctgatttatgtggacatggtgacggaaaccttatcttcttactcacaaaaagtccgactgaccaggattgacttactgaaccttgtccccgatctgttttttctcccggctaaactgaaaaaacggtttcaacagctttggttactattgatttccccgctacagttgcgtaaatatatgtgcaaatacaatggcgacatatttcacctgatggatggtagtacctgctatgttctcaggaaaataccgccagaaaaatgtgttgtcacccttcacgatttaattcccgttttgcaacaaaaaggggaatttcccatacccccgcctggttttttcgcccgctggttaattagagaaaacttaaaatccctcaaatcccagaaaaatatatgtgttgacagcacctgcacaggtcaggactttcaacagaatgttagcaatcaaattgttcccactgtgattttccctggtattagaagtagcttattagacttaatcccgtcagaaatccccggatggcaggaacgagtgcaggatggaaaaagaataattttgcacattggtaacaatggcttctataagaaccgagcaacggtaattagagtttttgccgaactggtcaagagtcaccccctgtcattggtgatggctgggtctcccccagatatggatctgcaaatgatcattcaagaactgcaagtaggtgacaaaattacctttgtttcccatcccaatgatcaggcggtatcctccctatacctgaaggcttccatcttgctttttcccagttactatgagggatttggttggcctcctttagaagcgatggcttttggctgtccagttgtttgctctcacagtggttctctccctgaaatagttggtaatgctgctctgatggccagtcctgataatctatcagccatagttgcacagtgtgactttttactcaaccaatcggaggaagcaacaaagctagtgcaggcgggactagagaatattcaacgttttagttccctgaaaatgggggaagatctcattaatttttataaccgcgtacaacggtgagggagccggtgaatagtgatccacacaccgaaaccggggaatgaattaagaatctcaaagcttaaatcgtttgaaaagcgactggttttaattatattttccgagttttacaaacaaattgcagtttacaattttagtcaaaatgttttttaaaattgacacattaaattttttgatttctcatcccctttcttcttcaaaaccatggaaagcaataatgaattttgtgcattggcaattacattatatagcaaccctaaatcaatcatgagaaaacaccgtagtcatgaagtttagggaagtcaaatatttgacagttgattgatagttcaaataactccttgatcacagtaaacgagtgacagaaaaaat

SEQ ID NO: 133 - DNA, 6308 bp, Sphaerospermopsis sp. LEGE 00249
  LEGE00249_238
acaattatcaattatcaattatccattatcaattatcaatcacatcccgtacatcctcaaatcctggttatcctgattcagacaattatcaattatcaattatccattatcaattatcaatcacatcccgtacatcctcaaatcctggttatcctgattcaaacaattatcaattatcaattatccattatcaattatcaatcacatcccgtacatcctaaaatcctggttatcaatttagttttggtgcaattccatcaactaaattttgtcaaggagtttatgaaatcgctgaatatttccgtgcgggaattgttgtcattcatcaattaccagaaactcccgaaactatctggttaagaattttaggaagggaaaaagtacaatcaaaagcaattgatgagttactatctttagatactgacgaacaattcaaacgaaaaacgctagaattattctatgtgttgatggacagaatcgcaattagaaaccctaaaacaatcacagaggtaaatatgagacggttagttaactactatcagcaagatcgtgatttagcggttcaagaaggtaaaaccctgggtaagaatgaagaaggaagtttattagttatcaaactattaatcaaaagattcaaaaatattaaccccgaagttacccaaaaaattcaacaattatcactagaaaaaattgaagaattagcagaagcattacttgattttaaccaatatcaagacctagaaaattggttacaacaaaatcagtaatttggtgactggtgactggtgactggtgattgggatataattattttattctgtaggttgggttgacgcaaggaaacccaacattttaatttcatgactggttgaacatagattgtagcaggtgagaactagcacgaaaattagttttttgtaatgcggtaattgttgttttcaaatcaattaaattctgattagctgctaaatttaaaatacccaataatccggtaatttttaaacctctagattgggcaatttgacgagcggctttttcatctataataattaaattagcttggattctttcggctaataatattgcttctttttctccctgatgtaagtttactaacatattatcatcaggaatgttaacagcagcgacttccaaccattcaggaatatttgtgatccatttttgtaccttttccggtgttcctgttgcttgtagttcttggtaaacagctttgggaatcatgactttaccaaataattgtggtaataaatcaatttgttcaatgatgattaaataacaaattggtgaagtatctgcaactacaatcatgatgataaaacctgatttaatgtttccatatctgctgctaagtctgcttctgtataatctaaatcaacatgagcattttttaagaatgtttctgtttcccatcggctagaaaaatgtagtaattcttgaatttgtgcagttgtgatcatgccatttttataagattcaatagctaatacttctaatattttttgtggtaagttatgccaattttgttgtaatttttgtccaatttcttcaggtatttcaatggtaatttgcatatttttaactcttgttagttagtgattggtgattggggtattattattttatcctgtaggttgggttgacgtaaggaaacccaacattttaatttggtgactggggactgggatataatttaacgcagatgaacgcagataaacacagataaccatttatttctgctaaaaacagtgagttttgccaacactcaagcccgaatcacagtaattctatattgattttctgtcaccaccacctcagttgataatctctcctccataggtaaagcatttttctgcctatcaaagataaataaccaaccaaaatctaaacccaaacgccctaaataagattctaattgttcaattccatcaccttgaggatcgcgttttttatcccgccacactttcaattcaattcctaaaattacatctttataacgcaaacataaatccattctgtcactaccaattgcatattccctttctaaaactcctccaccattaactacacgatgtaaaaaagccattaatactatatggggggcaatttcatggtaagcagcactacttaataaaggttctccatgttgtcgccaaaacttgagaaatgcagtcaataaactatctatatttaattcacctgttgtagtcaaccaactaggactaattaaaggtaaactatcctgagttccttggactaaaacacggggaattacttcccgatatatgggattagaaataactaatcctcccctgggatcacgtcttaataatcctaaatctattaaatattggcgatcatctgctaaagtgtcaggtaatgtttgccctgctaaaatgggttcaataatatttttaactcgtttttctcttaatcgttcagctaaactatctaaatgagtatcttgacgattaattaatatttccttggctgttaaaatatgttcttttgtaatagtaatatttctatcttttaccattttttctacaatttctttagctaaagcattcactaaccaaggttgtccttgggttaaatcataagctgtttctattgcttctggtgtgaaaatttgtcctgttgctgctgtatgttgttgatataattctcctacttctgcaagattaaaatttctcatagtcagagaagcaactgttatattaaaaggactagaagtatttaatctgtcactacctcccgatgctactttataatctcgcacatctcgtaaaccaattaaacctactgatgagggaaaattttctggacggttaggaaaaccatctcttaattgtcgtaaaatagaaattaatgtttgatcttgtaaagaatcaatttcatctataaataatactaaagggcggtttaaagatgttgcccaagctgataaaaaagctttaattctgcttcctgtttcttcctgttgctcctgatacatataacccacattccgcacttcgctttgtaatacatgaagattaagaaaattggggttaatggtggttgaatagcgaactgcttgcagcattgcttcgctatcgccgaagggctataattcataggtttaaatagggtttgctgagaaagtcttgtcgtgatgacaggtgacaggtgacaggtgctaggccacgcttcgctatcacaaagtgcaagcttttttaggatcatagcacctaaaaccaggcgcaattttaattttcatcatccttgatcccttgatttatctaggttctacatttattcagcatcccctatttatatcccaatcaccaatcaccaatcatcagtcaatattaaataacggtaactcattatttgtggttttggtatttttcaccgtcttctttttatcactcttcccttttttcttcccttctgcaacttttcctcctaatatttctgactcatagcgtttttggttgagttccaataatttcgctaaaacttcatcatgggttgactctggccaacgatatctccaaggttttttcttacttctttctcctctcttggtaggagagatatcaggggtgaggtcttcttcttcgtagtctaataaaaattcgcattctgtggaaatgtcaccccatccgtaagcgttgagaacctctttatccattgcggtgtgtagttctctgagtttaataatgtcggggtcgtattcgtcggggtcatgaaaacggttgtaggtttctgtcagtccttggttattttttaccatcaactccgcacggtattcataataggtttttcccgcttgttctaatatggggttgttttcccagttttcgggaaaggggaaggtttcaaaacagtctgatggtgtgtaacgcagtctatcttctaatgatgaaccaaaaaatcttgtccatatttcatggatgcgagattgtaatatacagaaaaatgagtttttatcatttgcaaatactaccaacgcttcagaaaaaactatattagcttccatgaatgctgtacaccaatgtggttgatgacgagaaataaccaaaacacgatttaattgtgatattgcttgatttaggtcaactctattattccaaaatttccaccactcataaaccattcttggatattttttaccatccttttttaatctttccggtttaactttctcctctaaaatattaattaaatcaggatattccctcgcttcctcctcactcatttccccaaaattaatcacatatctccgatgtgcatgagtaggactagaattaacttcctcacctccaatataaggaaaaattctttctgcattttggggattttctgtaattaacctttgcatttctgctatcggtgtagcttccgggttatcatcatcaaaagtgaaacccattcctaaaacaatactaccttgaaaactcttatccgcatttgctaataacttctcagggtctttatttccccccgcatgaaataagaacgccgaaattaaatcaacttgcttattatctaacaacttttcccccacatactcacccttaaaacagtgaacgacgctaaccaccaccgcagctaaacccggccactttaaccgtttttgggcattataaataattccctcatgttcacaaatatatctcaaacccgtgctgcgagtatctccctgggcgatggtgttagtagcaattaagccaaaagtgccatttttacgtaataaatcaaacgcccttctaaaaaaatgtgccactaaatcaccttgacctccagattcatgattgacaactttcaaccaatctaaataaccattaccaaaattagaagaaattttactaccacccaaaaaaggtggatttccaataattgcatcaaaaccgggattttgattatcaaatacctctggaaattcaatttcccaattaaaaacaggaacaggtttttccccagattttaaattattacatatattgataatttcttctttctcctgttggggcaaccacggggggtttgcttctaccgactcctttacgggcgaagcattcggatgagaaattcttgatttttcctcaatatttttgtccgaatgcttcgcccctaccttgccaaacattaaccgaaatttatctaactcatccttccttgctttatctttttctgctgcaaaaaacgccgcaataactaagtcacctctaaccctggtttcctctaattctttttccacatcttcgtatttttcccgtttctttccatattcatcatcaccaaaattaacaatctcatttctataatttttcacattatcaattgctaatggtaaagataaactttcatctgtataggtagtatccgctatccaactaaaatttttaatctgttcccgtgtcaaccccaccaaagagtcaccccatttcaacgcatgatctaaaaatgtaaaggtatgatttttcgctaaggttgccaaccacaaagacaacttcgccaaattcacagcaaacggatttttatccacaccatataaacaacgttgtgctacaacccgccgcgcaaacaataacacatcctcatccccaggaataaccggagtatttccctgtttttcccacgcttctaccaccttttccgctatctgacgacaaacttctaccaaaaacgcccccgaacccatggctaaatcacagacttttagatttaaaatgtcttcagatgtggggttttctcccaagttctcaaataccggtcttaatgtttctgtaactatgggtgctgttaacgcccttggtgtataatgtgacccactccgtcgtcgttcttcccctggttgcaaatacaagctacccacggccattaaactcggtgtttttggtgatactttccgccccagtgcatttactacttcctcagccgtttttgcccctttcaactcggttaaggatttcccagtaatttcacagttagcctgttcttttaaatactttaccctatcccctgccttggttttgagaatatcatcaacacttacaaccaccgttacagaagcttttgcacttttgggtttactccacaccccgatagatgggctagtagccatttgcacctcataacccataatcgcctcatacacagatccgatttgttccacatctaaggaacggtaagaaagtctttccccatcgagtacaagtagtccttgtaacacccgaaaaatcaccccatcggaaacgcgggggatgtcgggagtaggggaagtaggggaggtaggggag

SEQ ID NO: 134 - DNA, 6258 bp, Sphaerospermopsis sp. LEGE 00249
  LEGE00249_242
ccccagtccccagtccccagtcaccaattacccagaaataggccataaataaattaaacctacaggttcaactcgtaccgctttcacttgataagttctttcaattctctccggttcagtaattaattctatctctaatttttccaaccttttcacccaataacgacgatctgcgtctatttgtttttgttcatctgcgggaaataatgataattgtattttggtggtttcttcctgtttttgggtaatacgttccttttgttcctctaaaatctttttcatttccccagcttcttttttacccctttcagttaattttttctctgctctttctgctaaaatttgagcgcgtttctctaaatggggaatgagttctccaatatcctgacttgcgtgtttttgtagtctggttttgatcccttctcctacttcatgaaaatgggcgatcgctaatgagtcttctaacaactgcaagacatcctgtttatccccttctcccaatggttgcagtctttttttaccccggtttgcaggatctatccattctgcggccattgcgatcacctgatcatgcaacctggccgctttgtctccgtataacgacaaccgccccaaaacaataattttcgggattggatcattggttaaacacacagaagcacgggtaagttcatcatgtaaaaacccttgggataaaaacctgcttaataatctctgtactaaccgatgttctaaatgtaaatgtactacatccccatccaaagaacctggatcacggaaaactaccggacgaataggtgcttctctgcgccattcccagggtttttgtcctctttgtttcggtactcgtaaagtatctaaagttgctgaccaagtaggatctgccccggtttgctgatccagtgctggaatcatccaccgggcagttatcgggttattaaccgcctcgctttcatccagcggtgttaatggggaagcgttgagaatttctaaagatgcagaaatagctgcccggaaatgttgatcacttaaatttaaccattgctgtgatttttttaacatttcttgcagttcacccagttgtttatttaggtctttttgtctgattcttgctgcttccaactcggcgttaataacttctaaattcccctctgttttagtatctattttatcggcttgattaatttcctccgtaatattattgatgctttgatggcgaataccgtccgctaataaccgggaaacttttttctctacaaccggcgcaagactgcctaactctcgctgaatattatctgttttccgtaccaaaacatctaaaaccttatcttccacccgttgaggtaagataaaataataacatctcactaaaggcgatcgctgtaattttctatctatccgtccgttgcgttgttccatccggctaggattccaaggtacatcaaaatgaaacagatccgcgcagtgattctgtaaatttaccccttctctcgccgcatccgtagcaattaaaatccgtaatggatgccgactaggatcactattaaacgcctgtttaatttcttccctcctgtcatcccctatccccccatgaaatacatctatgcggttatctgctagatgagaatgggcgatcgctgcctctaactgttgttgtaaatagcgttttgtatctgtatattcagtaaaaataatcactcttttatttaaccaagcagcgttattttcccccaaatcaggacaaagattaactgtaatccactctatcagcttgataatcctggggtctggctgataccgtacttgatcagcaatttcccccatttgccgtaaaatctctaattcctttggtgttgcttgtaacccatcttccctactagcggcgctcatttgtgcatcttcttccgcttctatttctgcctctggtaactccgccctgtcatcatccgcccccgcagactctaataatactggggactggtgactggtgattggtgactgggaaaaataggaataatttccctttgcacccctaccttcttgacttctttctatagcagttctatgtacttttaaagtccgagcaaaagcttcaatagaagataacaaccgcttttgtaaagatgtaattaccaacattgccgcagcttgggcggttttagaaacatcctttaatctttcttcccgtaaatgacgatattcttgtaataaccgagataattgtaactctggggcattttctggcaaattatcaataataatcggtgttacctgacgctggggaaaagcttccccgatctcccgtaagtcctgctttaatcgccgtaccatcaccgtatcaagtaactgccgatttcgcaccggtacacctcgacaaaacctttgcggatcaagaatttccaataaagctgcaaaactattagagtggccattgtgaggcgtagcagacaaaaacaacttatgttcaaatcttggcgctacttcccggatagtccgggtaaggtgagagtccaccgcatatttagccccactcgcaggggcggcattgtgcgcttcatctaaaattaacatagaagcggcgttaaaatctcccaaccaatcccgtaaaggtgcagagtatgtttcatctctaagtaaagcatgggaaataataaaccggctgtgagtcgtccaagggttaattccataacctcgttcttgacgacgggcggcgacaaactcccgatcaaaaatcatgaaagtcaacccaaatcggctttccatctcctcccgccattgtcgcactacggaaggaggacaggaaataacaacacgcttaactttctgccgcatcagcatttcccgcaaaattaaacccgcctcaatggttttacccaaacccacatcatcggcaataaataaggctaccctgggcataagtaaggccttccgcagtggttctaactgataagctttaacttctatccctgctcgataaggtgcttgaaataacttagtatctgtggaagttacgcaattccagcgtaaggtatgcaggtaagcactaaataaccggggctggtcaaaaccgcaattagctacactttcccaggaagtagtaccaatgatttttgcgtctatttccctttcccagaggacttctaactgttctcctaatgcatcatcttctaagcaagataaactaactttagtatcttctttatcatttggtttaggtactacatcttctacaagatattgacgcgatcgcacccgtactatttgacctgggataatattatttatgtcagttacagtattattcacctcaaccagccccctaactgagtatttgcaagctaatcataatcataatctgtttcatatatttcaacactgagtatttgcaagctaatcataatcataatctgtttcatatatttcaacatctggtgaaaccccagtagcagataaatctaaaacatcatctgtcaagctgataatttcccccctaaaaaattccgccaggcttttagctgcttttgctacttgttcagcattccaagttgatacaggtgctggtgatatgggtgctggtgattggtgattggtgattggtgattggtgattggtgattggtgattggtgattggtgattggtgattggtgattggtgattggtgatatgggtgttggtgatatgggtgttggtgatatgggtgttggtgatatgggtgttggtgatacaggtgttggagttggtgggggtgcagaattatctactgaagctgtatttgtaactacaggctcaattttcggtgtaggtggaggtggtggtggtgcgggttgtgatgtaggtggaggttgattataaataggggttgtcggtagttgctgaacactagtagaatcttgtggaggcgaattttttttagctgtggcagaagtagaagaagttgctttttccaaacttacttggatgtcacgttgaaaagtgtggtgaaaagcagttgtaataataggtaaataagatttaactttgtcataccatttaggttgtacagcaacacgagctatgacatcatttaactcgattaattggcacatttgacctagtaaagttcgtggtggtaactgttggatgttattacggacttgatgccaaatctgatttaaatcatactccgatcccgctactacttcctgtgggggtgctgtgggtgttgtctcaggtgcaggaggtgtataaacaggttctgctgctggtgtggatatcgtgtgaggtggtgaattatgataattgggttgattataagttggtgcaggagtagatgcaggagtagatgctgtgttaggtgctaaattttgatttggttgatgatttggttgatgatttggttgatgatttggttgatgataagctggtgcaggtgcagaaactggagaatggtaatttggttgagtataagcctgtggtggtgcaaatacagcagatgtatttgctgcttgggggatactaggcgcttgtacctgaatatttgcactaggtaataaacccagtaatgtcacttctaaccacaaacggggttgagtagtatttttgagttgtacttcggctgttcttaaatgttgctgtccccgcagaattgtggttatatctaacctgtgggcaaagttaactaataaagtccaagtttgttgagtacaagcaactaaatcttgtcgagttggggcggttttggctataagtaaatctcgataaaaagcggccaaattttggagaatgattaagggttcacgtcctcgatctaggattttgcgggtagaatctaatactatttctgaattatcttgagcgatcgcctctaataaaaccagcaaatctttttcactcactgaacccaccaagtcccaaacctgatccggtgatacttcccctggtaacaaagctaattgatctaataaactttctgcatcccgcaaaccaccctgtgaaagttgggctaccaatgtaatagcatcttgagaaatattaatactttcgttattagcaattttacttaaatgtctaaccatcgcttctaactgaatccgccgaaaatcaaacctttgacagcgggaaataattgttggtaatactcgctgcggatcagttgtcgctaaaacaaaaactacgtgcttaggtggttcttccagggttttaagtaacgcattaaacgcggcggtacttaacatatgacagttatgaactaaaagcccattagcaacaaagttgtgattatcctctacttcaatatcatagactcgctcaactccagcgaggtgaacagattcgaccttctccaaatttgtagttaaatttgtagttaaatttgtaaatgagagtgccgcatccacattcacaggggatagtatctttactcctgcttttacgtctcttgctggtatccatccctgatctgttctgattaaatgattacctgtacatctgatttctcggttagtggttttgatcaccaaggtttgcttctctccttgatctaaccaacgaacaacttttttaaattcccacttgcctaatgaatcattgtaactcaggactttcttacccttgatactggggttatcaatgcgaataagcccctcatcagttaaaactaatgaatctccggttagacattcatctatcacataaaccttatagcgacactgcaccggagcaaactgcgctttttctatcaattcccggatattatcaacaccagtattactagcagcgtcaatttcaattacatccaaagaatagcctttggtaatgccttgacaaatatcacacactccacagggttcagcagtgggattgttacttttaagacaatttaaagacttagccaaaatccgggcgctggaagttttccccgtacctctaggaccagtgaataaataggcaggggcgatttttgccgaattaatggcattggtgagggttgtggcgatcgcctcttgtcccactagttcagcaaaactcttggggcgatacttatggtgtaggggttcgtaaggcataaagaataggcagttaacagtgaacagttaacagttaaagtaaataggggttgctgagaaagtctttccgtgagggcataggagtcaggagtcaggagtcaggagtcaggagtcaggaggagattggaaaatttctttgccatctcttgaaatcccaaaaaatgcacactttttctggtatacccttcaaaacccttgcactaatttctgtgt

SEQ ID NO: 135 - DNA, 6137 bp, Sphaerospermopsis sp. LEGE 00249
  LEGE00249_244
ggtaggcatcttgcttgccttgtataattagggtttgctgagaaagtctttccgtgagggcataggagtcaggagtcaggaggagatttgaaaatttctttgccatctcttgaaatcccaaaaaatgtacactttttccggtatacccttcaaaacccttgcactaatttctgtgtttatcagcctctaacttttgatatatcaaggttttaggtttattcagcaaaccctaattacccattacccattaccccaaagtaaacagggtattccaattaggtattgcatcccgttgagctattaataattcttgtatccctttttcggcaatatctaacaatttatttaactgctgacggctaaagctgccttcctctgctgttccctggacttcaataattcctagattgtgattcatgacaacgttaaaatctacagtggcggctacgtcttcaatgtagttaagatccaaaaatgcttctgactctaataagcccacagaaactgctgccacttgtccacacaaaggcgatcgctctaatactccccgctgcaataattgagaaatactatgggctaaagccacaaaaccacctgtgattgctgttgttctcgttcccgcatcagcttgcaatacatcagcatctacagttagcgtccgttctcccaacgcttcaaaatctaaagctgcccttaaactacgtccaattaaacgttgaatttcttgtgtccgtcccgataattttaataattccctttcctgtcgctgttgggtggcagatggtagcatccgatattcagccgttaaccaacctttaccactcccggttaaaaacctgggtactccctcagtgacacttacagtacaaagtacctgagtatcaccgcattttgctaacactgaaccaggggcaaagcgggtaaaattaggtgaaaaactcagtggacgtagttcataagggtttcgaccatcgggacgctgccaagccatttaatttgcctcagaattttgaaaatttgttcattctgctgtcagggaattgggaattgggaattgggaattgggaataaataattatctattcactgtcaccagtccccagtcaccagtcaccagtcaccagtcaccagtccccagtcacctgtcacctgtcaccagtcaccagtccccagtccccagtcaccagtcaccagtcaccagtcaccagtccccagtcaccagtcaccagtccccaatcacccatcaccagtccccaatcacccatcaccaattaaactgagaatattgtgctgtacttgttctggtgagtcgtcaccattaatggttaatagacggcgacgacgatcataatattctaaaataggaatagtgcaatcatagaatagttctacacgccgctggacaatttctggttgatcatctgggagcgatcgccctaaagaacggctaaccattaccgcttctggtacttgcagataaatagcccagtctattttttgccctaaactgtccaacaaaaaatctagttcttcagcttgaaaagcagttcggggatagccttctaagatccaaccacaattaacatccagttgactgaggcgaactttgatacattcaatcatcatttcatcaggaactaattcccctttttctagataaggtttggcagaggagactaaatcatttggttcaccgtacccattagctgattgattaccagatatagtttcccttaaaatctcaccggtggaaatcagaggcatatcaaggtatttgcaaagcctttgtgcttgagtgctttttcctgagcctgaacctcctaaaatcaccaatttcaccacaattcactcctcatcatcatttaaaattcactactgcctaactctgttttactcaaaaaattaaaattatctaggacttacgcaagatgtgactgaaaaccttattcttgcgtaggggtaattcatgaattacccctactttcgtttccttttgcgtaagtcctgttataagaaaaagggctgaaaacccttgaggttaagtttttacgccacgctccaaaacttaaccttcgtgtctgtattcatctggagaaaatttagccattttggaaatcacccttgcttgctgtatagtgtatattagatgatatctaaaactcaaggaggtgattaagtagtgctggtgttagagtacaaagccaagtgtaaccaatgtcaaaaacaagctattaacgaagcaatcagaacaactcaatttgtcagaaataaagctattcgttactggatggattcgccaaaagaagcgaaagttaacaaaattgcattaaataactactcaacagcactacgaaaagaatttagttttgtagaagcattaaattcaatggcttgtcaatctgcaaccgaaagagcatggcaagcaatccaaaagttttacgacaactgtaaaaagaaagttgtaggcaaaacttgtactgagcctgtccttagcgtagccgaagggcgtagtcgaagtaagggatatcccagatttcaaaaagataaccgttcagttgaatataaaacttctggatggtcattacacccaactaaaagacgtatcacttttactgataaaaaaggtattggtgagcttaaattattgggtaaatgggatattcacacataccctgtcaagttaattaaacgagtcaggattgttaaacgtgctgatggattttatgttcaattctgtgtagatacagaagttaaacaagaatctagaatagctgatggtgaaattggactagatgtcggtttggagtatttttactctgactctaatggacatcatgaacctaatcccaggtttctaagaaaagcagaaaaatccatcaaacacgctcaacgtcgaatctataccaaagaaaaaggtaaaaatcaaaggcgaaaagcaagacaaagatatgctcgaaaacatttaaaagtaagtaggcaacggaatgaacacgcaaagagagttgcgcgtaacgtatgcaaagctaacgctttagtagcctacgaaaatttaagtgttaagaacatggtaaaaaatcattgtcttgctaagtcaattaatgatgcggcttggtctacttttcgccaatggttagaatattttgctgttaaattcaacagttttgttgttgctgttgctccacattacacatcacaaaaatgtagtaattgtggtgcgattgtgaaaaaatctctttccactcgtacccataaatgtagttgtggatgtgagttgcaaagagatgttaacgcggcggtaaatattctacatttcggctttgctcaatgtaaaaatcttgctaaaaatagggaagggcattcccgaattaacgctacaggagttgggatctctactctggttggtgaaaactgaagagagcaaattctgacgtagaatgtagaatctccgtggctttagcccggagagtgtcaacttagataattgatagatactaccgtttatcttcatcatgatggttgcccaattagaaacccccagtatcaattcaacactcagcttacaatattctgtagctggattagtacaggttttcactagctctcatcgtaacttttttactagtgttatatcacaagcattaagaattgctggacaaggtacaccagtgttaatagtgcagttcctcaaaggtggtatttatcaaggacaggacaaacctatacaaatggggcaaaatttagattggattcgttgtgatttaccacgttgtatagatacaccaaatttagatgaaacagaaagccaagcattacaaaagttgtggcaatatacacaacaagtggtatctgaagggaaatattctcttgtggttttggatgagttaagtttagcgattaattttggtttaattccagaaacagaggttttacagtttctagcaaaccgtctttctcatattgatatcattctcactggtccacaaatgccgaaatctctattggatgtagcagaccaaattacagaaattcgtcgtagtcatcagccgtaattaaacctggacgggctagaagcccatcccacaagacaagattggataatttatttcctggaagtcctttattgcttaaactaagctatcaggatctactcccatttctcgtaaacgttctgctaaaatttgagcgcgttcttctggtgtaaaaaagcgttttccttgttggttataccaatacatccattctctagtaatgccttggtaagttcctctttctataccaattcctaaaccaatttctggcaaccaaacgatattaccatcttgtaatttataaactccattgattaatttgtgaacttctaaccggggtttacggcgacgagtgggattataaactacataatataatatacctaatttggcatattcatctttttttgttgaatactcattcctgtaattgtgagaaacaacttctaacgccaaaattggtaatttttcttcttcccaaagtacataactaggacgcaagttttcatcataaaaacgctcaacccctaaacttaaaaatccatcggggacaattggtggttgataggggtcataataaatgcccatatccacaccaaaaaaccagtccatgcggtcagcccaaattattgctaatattgctttaagcaatccaggaattaaatcttgtaattcattatccacaggtgtttcgtctgagtctggtaattcttctgaagaaggcatacaagccaggggattgtaatctaacatgatagatttcactggtctttgaatattttgattatatgagattggggactggggactggtgactggggactgggaggatgaataacccaatgccccatgccccgaaatgtggcaaaataggaagttgtaataagaaaaatattgttaaggtaatttagtgactccaactgctcaaactacagcaagtgcgcgtcgtgcggtctttccgtttactgctattgtcggccaggaagaaatgaaactggctctgctgttaaatgtgattgatcctaaaattggtggtgtgatgatcatgggcgatcgcggcaccggcaaatctacaactatccgtgctttggctgacctgttgccagagatacccgtagttgccaatgaccccttcaacagtgaccccaatgacccggacttgatgagcgatgaagtccgtcagttagctgcacaaggggctgaaattcccatagctcataaaaaagtgcaaatggtagatttaccattgggtgctactgaagaccgggtttgcggtactatcgacattgaaaaggctttgtctgaaggtgtgaaggcttttgaaccgggtcttttagctaaagcaaacaggggtattctctatgtggatgaggtgaacctgttagatgaccatttggtggatgttcttctggactctgctgctagtggttggaacactgtggaacgggaaggtatttctatccgtcaccctgcgcggtttgtgttggtgggttcgggaaacccggaagaaggtgaactgcgtccccagttgcttgaccgttttggaatgcacgcggaaattcacacggtgaaagaacctgctttgcgggtgcaaattgtggaacaacggggagattttgatcgcaaccctgtgggatatttggaacaacacaaggcggatcaggaagctttacaggagaagattgttaaagctcaggaattgttaccccaggtgaatcttgattatgatctgcgggtgaaaatttctgaggtttgttcagagttagatgtggatggtttgcggggtgatattgttactaaccgtgctgctaaagctttaactgcttttgaaggacgcacagaagttactgttgatgatattcgtcgggtaattactttatgtctgcgtcaccgtctacggaaagatcctttagaatctattgattctgggtataaggtagaaaaagcttttgctcgcgtttttggtgtggaacttcctgaagatgctacacagaaaaacggtactggtgtcaaagctggtgtacgttagataaggtgactggggactggggactggggactggtgactggggactggtgactggggactggggactggggactggtgac

SEQ ID NO: 136 - DNA, 6102 bp, Sphaerospermopsis sp. LEGE 00249
  LEGE00249_248
ccttctatgcgttgctgagaattttcaggacaatttctaccccagaaactgcttgccaaataaaaagtcctaaaatcccaaaattcaacaaaatatgagtcgcccgcgcccaatttgccccttttcgcatgaagggagacaaagacgcagaaaaggcgatcaaaccagtcattcccaaaccagctaacaagtgtggtccgacaaataatttaccgttattgatgtaagtaacagccataccacctattgaacctgctaccatcaaggctaagatgatcgcccctattttctcgtgtttatcattaaatttagctttaattagttcttttctttcttctgctgaagcatttctggtacgctggacttgtaaacctgagtaagcagcatatagggacaacgctaacaatatccacattattgttgggtgaacaaactctaacccaaatttgacctctggagcaagttctaaactcatcgcttggttatccaaattattaaatctttataaaacttagcataaattgatttaggactattaggactattttgttttttctctcttgctaaagtgcagacaacaagcacaaactagtttttgatgctaaatcaagcaatttccaccagggcggaatttattatatgattgataaaaatgataatttactgctgaatgcggcaaaaagcggcgatatcaagcgggttggtgaactattagctactggtgctaatgtggatgggtgcgatcgcaacggcactacagcattaatgtttgcggctaatttgggttatacggaaattgtgcgatcgctcctagattttggcgctaatatcaatttacatagaaaaacataccggttaacagcgttaatgttggctgcaagcaataatcaagttgatattgtgaagcttttaatatctaaagatgcggatataaacgccgttaatgaagatggtagcaccgctttaatggcagcagcccaaaaaggtcatctggaaattgtgcaaattctattaaatgctggtgcggatgctagtattaccgataaagacgatgatagcgccttaaaacttgttatcaaacaaggttatacagcgattgttaaagccatactacaaaaaggtaattttgtcaataccccagatgcagaaggtgaaacacctttaataatggccgcagacttgggaactttagatatagtacaaacactgttattacacggtgctaatcccaacatcaaaaaccccgatagcagtacagcactaatagccgcagccgcagcaggacatagtaatattgttgtagctttattagatgcaggtgcagaaattaatcaccaagacaaagaaggagaaacagctttacactttgccgtgctagaagaatacctggatacagtgaaaatcttacttcaacacggtgcagatgtagaaattagaaatcatctaggagatacacccctactgatagccgcattccaaggatatagcgaaatagtagcagctttaatgagtgcaggagcagatgccaataaaaagaactttggggaagttgccctcaccttagcagtatctcaaggacacacccaaacagtcaaagtattacttgacaatggtgctaacatcaatgttgtagcagatgatgggaaaactgctgtggtaaaagctttagttagcaaccatccagagatattccaactgctaatagaaaaaggtgctgatgtgaatttccaggactcagcaggtgcaacagcgttaatgtatgctgcatcagaaggttatactcaagctgtgcagatgttagttaatcatggggcggatgtcaacttaaaaaaccaaggtggttatacagctttaatgattgcagaatttaacagttatcgcacaatggcgaatattttaaggcaagcaggggcgcaagagtgatattgagtccggttttattgctgagtgctgatagcttattaagcaaaactccgctgtaactgatgtgagtttgctacaacggagcaacaaaaagttgaaacaccaagatcaaaagcttgagttacaagggtagaaaaaagtaaacctgaagacttaatttaccttttaccttagttttctctataccttgatgtttcctactgtgctagacataaacaatatatcaatttttattttggcgacagtattggaattatcattttttgtgtatcgcaatgtaaaataacagaaaatcaatctgtcttgagtgtgattttctgcctattgataagcttttggaacgattctatataaataattaaatttttagattttttatattacagcagttttcatgtatttaggggttgctgagaaagtctttccgtgagggcataggagtcaggagtcaggagtcgtaggggcgaagcattcggacgacaaattatcaattttatgaaaaggctattttccgaatgcttcgcccgtacaggagtcaggaggagatttgaaaatttctttgccatctcttgaaatccccaaaaatgcacactttttccggtatacccttcaaaacccttgcactaatttctgtgtttatcagcctgtaacctttgatatatcaaggttttaggtttattcagcaaaccctatttagaccacactctaaattaatttctttcttcctttgcgcctttgcgcgaaacctgaatcaagatgtagttcatttacctgaaaatagctgtaatctcgggtgattatttatgattaccgcatctgtgcaacaactagtaaactccttatgggtgggtatcggttgtcaaaaaggaatttctgaccagttaattgatatagcaattgagagaacttttcaaacatatcagcttgcttataccgatcttgcgggtattgccagcattgatattaaagcttcagaattgggtgtaagagaattttgccgaatacataatttacctctcaaaaccttcaccgcagaagtcttagctggtgtcagtgttcccaaccctgggaaaataattacagaaacagtaggaacaccgagtgtagcagaagcagcagctattttagcagcatctcataatacttcagcagtgagtttattagttcccaagcaaattttccgtttaccaggggaagtgggagcagtgactatagcagttgcaggatgtagagtgtagagtaaaaattaacttttttgctgactttgtattactgtcacctgtcacctgtcacctgtcacctgtcacctaaatgtcttctgccttcttcaatctactactctcagtacataattaataatactggaaacaattgccagtacaatagagccgagaaaagcaggtataaaaccctgaatttcaaaacctgaaccgggagtgatagcacttgctaaccacagagttaaggcattaatgacaaaggtaaataaaccaaaagtaatcagggtaatgggaaatgctaacaaactcaaaattgggcgaatgatggcatttaccaacccgatgacaatagcagcacccaaggccgctacaaaagtcttgataatgaaacctggtacaatttgagatgttaccaataatgctaacgctgtacccagccaagttaataaaaagtgtttcatttcatccaattttggatttgagattttagattttggattttggattttggattttggatcttggattttagattgattctacagttgatatcctcaaactcaatgcagctattgtgaatttttaattttttcaacgttgcttgggtagtcgccgcacgaaagcttcccaagtagctccaccaaccacgccatctggttgtaacccataacgaacttgagcagctatgactgctgcttcagttccagcaccaaagtctccatctataccacctttgaaaaatcccaaggtttgtagtagtctttgtaatttggttacttccgagcctgtattgcctaaacgcaaaataggccatccggctgtagtatattgaatcttaggatttcgctgattgggcggagtcggctgaaagctgatgttaggcttattttgggcagttgtcgttggtttgggaggattaggttttggtacaactgtggcgttattaaccctagtgtttctattgggttgagcaggaactcccaaattattactggtggttgctgggacaacaaatggcaaggtattagcagcaacggttgatacattagggaaaagtctttgccaagtaagagtatctacaataccatctggatttaagcccgctgcttgtttaaaccgagaaacagccctagctgtaccttcttgataaacgccatctactgcacctgtataaaagcctaacagtgtcagtgctgcttgcagttctgagactcgttcaccttgactacctatttgcaaggtaggacggttgatgttacctactgtactgacttgggcaatttctacaggtgctgctattgatactctagcagaggaggcaaacagtaaaggtgtaacggaaaataaaagtaagcaataagactgtttttgtcttgagtagtggtaaatactctttatcaagtgatatttcatgtgatctacctgggatattcttatgctcatcttacaccttaattttctatagtcctcttgccttttgcctcttaccttcttccactgttaactgataactgatttaattgcttcttcttgaccaactaaagacacaaaaggttcctgtaaataactattagctgctgtcattgctaacttaggactgactttgttgatgagttcaggaaattcatggtcaaattctattcctaaacctagaatttcataccaaccgtatatttgagcaatttgtccgttagtttgtttaccgagggcatactgtcccaagattttatttttagctgtttgtagttcctccgcagatagttctgtattacacagtctttctacttcttggcgcaatcctgcgagagctatactggtattttctggtgctgtccccatatacactataaatgaggcgggaaacaggcgtgtagagtaaatagcagagacttcataagctaaacctcttttttctcgtaattccacaaataagcggctagaaagcccatttcccaggtatgtagctaacaatttgagagcggggtatccaggggcgctgactgatggacccatataacccaacatcacaattgactgttgtgtatttaagggtttgagacaagattttggtgtaacagaaatagcgggtaaatctagtatatgccgtggttgctctggtggttgccaatcaccaaaaacttttgtgactaattcttgtgctgcttctggtgtaatgcgtccagcaatgctaattactatgttatctggacgaaaatgaacttggtgaaattctgctaagtctgaactattgatactactaagagtggtttctgtacctaaaaccgaccgagaataagggtgttcttggtacattgcttgtcgcatttgttcaaaagcgaggttaaaaggttgctctttttgggagcgaatgtcttgtagtgctaaccgtttttctagttcgatttggtttttgggaaatgtgggcgatcgcaataacaaaccagacaatgctaaaatttctgcaaaatcagcagttactgttttcaacgacagcaaaaaataatcagtacctgcatctatacttaaactcgcacccacagactcgactttttcagcaatttctaagctagataaaccatcacaaccttttgtcatcactgctgataacaaatgtgctaaacctgctgtttctactttttcataacagctaccagcacggacaaaaattctccccgcaataatatccgctgctgggttttctgctaccaataaaacaatgccatttggtaatacggtgcgatagatagaagtctgagaattatttatattttgcattcttgcttttaacaggttaatgatggaaggaggcaggaggcagaaggcaggaggcaggagtcaggaggtaggggaagcaggggaagcaggggaagcaggggaagcagggaaagctaataacccagtcaccagtcaccagtcaccagtcaccagtcaccagtcaccagtcaccagtccccagtcc

SEQ ID NO: 137 - DNA, 6061 bp, Sphaerospermopsis sp. LEGE 00249
  LEGE00249_250
ccctaaaccccaattataggtaaaccttgctataccagcgtgtttagccattaacatttcttgagttttatttaacttgagttttgttttgatggataaaagcatttgctgatgtcaacactatactatattatttaattctgacacattttgcctaattttttagtcaacttattccatgtatacgtcaaatacttgtagttttgtatgtatttgtataggtttgtctagtaaattgtcaacttaggacaagctctaataattttggattcactatgattcactctagagtgcagtatttgttccactccgtccgtattcaatcattcaaaattgcaaatttagcgatcgctcctcccttgacgaatcttccacagttcttacaatagataaagaaacattaaaaattgtaaagcaagggtttgtatcacgctatccaagattcttgcataagaacttgcataagaatctcaagctcaaaccccatcactatttcagaaaagacagttaagtttcgtttgccaatcaccattgtttcagagaggaacttttgatcatgacacaaccacaaccaaccgtcacccccaaattagaagaacccaagtttggattcaacgaatatgctgaacgtttaaacggtcgtgcagctatgattggttttatcttaatggtcgtgattgaatatgtcactaatcaaggtgtacttacttggttgggtttgaaatagtttccaccacaagccaacgatttcagatgtaagctagaaattagaagagtaaaaaccagttggatcaaccagctggttttaatttatggaaaaagtagcgcaatatctgtatagagtatggtgaattaccccacatctattttgaacccagaaaactataatgtgagatgacttgatagctagaaatgataattgaatagcaattgcgctattgtggaacaatttacaagaaaagttagcggaaagaaagctgtgatgaacgctatattacctcgttttttgaagtcagcctaccggaaagaacctatcattagtgtattagttacaatgggtatagtagatgcactgattgggggtttagatgatagctggtctttattcacctttggtttaggaacaacagtagtagctttagcctttaaattatggcgggtgcagcagcaaccccccatgccagaggaaactgtggtgcaacattatttaccacctcaaccctctactccaccattaccaatcattacagtttccaagaaaaaaccacgtcaaaataattgaaaattgataattgataattgataattatggattaatgcagaagagagggataattgtgagcaatgaagcaagcaggggaggtaagagatttatttcctctggacgcacccaaaagaatataccaacaggagtcagcattgctaataatttagctgttctggctgcactgcgatagcgtagcaaccccaaagccagccaacatcctaccacttctcctatccaccagccaaaaatcagaccgataaaagggggtataaatccatcgagagtagcatttggcatgaacattttgacataaccaacacctaaaaaatgacctggatacatcataaggcagcccctattaaactacctatacctgcggctaggtatccattctttttatactgatgcaaagacataatctcaactcaattgttcatgtttttatgctgtgatttagattcacaatcaatcaacatatttccgcagaatacttacaatgaaacacaatgaaacaattgtcaattttccattgtcaattttccattgtcaattatcaattgataaaaaaaccccctggatgggggactggaattcaagtggagtgaataaccacaaaataaatacctacagtaaatagattaatccgaacaaaatgatccagattacgtccacaaagtgccagtataattcagcggcttctatgccgaaatgatgttcattgctatagtgtccgggagtacgcgatcgccacaacactgccaaaattgctaaaaccccgatggttacgtgcaaaccgtgaaagccggtgagaacataaaacgcactagcgaaaagattggtagttaaaccaaattccagatgagtatattcataaacctggcctaccaagaaaatcgcacccatcagcgcagtaatagctaaccaagtacgcattcccttttcatcattctttttgatggcagtatcagcattgtgcatgacaaaactactggcgatcaaattgatagtattcacaccaggtaacaacagttctaactctggtgtaccttccggtggccagacaggtaaggtagaacggaaagctaaataagcaccgaacatacccataaaaatcataccttcagcaatcagaaacacaaccaaaccaaataaacgatgatctggatgtgcttcatgatgggcatctacagccccatgacgattttgttcaatgatcgtagtgttagctatttgactttgcatgaattttttatttggtaattggtaattggtaattggtaattggtaatgggtaattggtaattggtaatgggtaattggtaatgggtaattgggaattgggaattgggaattgggaatggggaatagttgattagaaaacataaaattgattacccagtcaccagtcaccagtcaccagtcaccagtcaccagtcaccagtcaccagtcaccagtcaccagtcaccagtccccagtccccagtcaccagtcaccagtcaccagtcaccagtcaccagtccccagtcaccagtcaccaatcacccattaccgaatttacacgccagactcaatggtgggatagggttcgtctggtttagcacttaatactttactgacatcaacatttttgtgtttcacgccgtagtcgtaaggacccgtagttaaaaccggcagtttctcaaaattctcaatagctggtggtgaagttgtcatccactctaaggtaagtccgcgccaagggttattaggtgctttttcaccatagaaccaactccataccgcattgatgatgaagggtaatgtggaaatggcgagaatataagctccataggtgcagatttcattcaaagtggtaaatttagggtcatattgggcaacacggcgattcatacccatcattcctagtttgtgcatgggtaagaaagacatatttaaacccacaatggttaaggcaaaatgaaccttaccccaaaattcgttcatcatccgccctgtcattttcggaaaccagtgatagatagcggagaaaatacctaacacactaccaccaaacaggacataatgcaggtgggcaacaacaaaataggtgtcgtgaacgtgaatatcaaagggaacggatgccaacattacaccactgacaccacccataacgaatgtacccacaaaacccatagcaaacaacatgggggtattgagttcaattttgcctccccacatagttgctaaccagctaaagattttgatccccgtcggtacagcgatgatcatggtggtgatcataaagaacatccgcaaccagccgggaataccactggtaaacatatggtgcgcccagacgattaaacctaaaaagctgatagccaaagaagaataggcgatcgccttataaccaaatatcggttttcgcgcatgaactgggataatttctgaaattgccccaaagaaaggcaaaatcatgatatataccgccgggtgagagtaaaaccagaacatatgctggtaaactaccggatcaccgccaccggtgggattaaaaaatgtagtccctgctaataagtcaaaagataggagaattaacgccccggcgagaactggtgtagatagcaatactaaagccgaagttgccaacatcgcccaacaaaacaaaggcatttgatggactcccatactgggaacacgcatttttaagagggtgacaataaaattaatcgcccccaaaattgacgatgtacccaacaacaggacgctaatgatccagatcgcctcacccacttggcctgttaccaaactgaggggagggtaagaagtccaaccagcatctggggcatcacccacaaccaaactagcgatcagtaatagaccggctggggggatcatccaaaaagccaccgcatttaaacgaggaaaagccatatccctagccccgatcatcagcgggatgagatagttagcaaaacccgcccctgctggcacgatccacaaaaagatcatgatcgtggcgtggagtgtaaacaagctgttataaacttccggggtgacaaaatctacctctggggtgcgtaattctgtccgcaccaaatcagccattactccaccaatacagtaaaaaataaaggatgtaaccagatattgaatgccgattactttatggtcggtattaaaggtgaaaaattcccaccactttcttacccctggttcttcctggaggtgagaaatattggtagtttcttgtaattttgcttgggtcatagttttttaaaaggagatcaaggagtcaggagatccaggagtcagaagtcagaaaaaagataaatattcccagtcaccagtcaccagtccccagtcacctgtgtaaatgcagcatttctggatgaatgcccatttcttggatgtagggggagagaaattcatctactgtcatatctgctgggttcatggccacagcttgatttaagttgtctttactggctactagctgttcttgcatccaactatcaaaagcctcttgggactctactattacttgagtttgcattgcgccgtggtatggtccacagagttccgcacacactacagtataagtaccttcttttctgggtgtaaaacgaacttctgtttgtctaccggggatcacatcttgtttgaggcgaaattctggcacccaaaaagcatgaatgacatcgttggcgctcatgttcagttctacttcttggccgatgggaacatgaagttctcccactgtcacctctgtatctgggtaggtgaacaaccaagcatattgtaaggcagagacgttaacaactaactgcggcgcttgtccttctttttcccgacttgcgcccaaggtgggagcgacactacccacaccaggagcattttgcatttgggaaatttctgtattacgaactgctgcggtggctggatcttccatggcagcgtcaaatttttcttgattcagatttggttttgtgctgccaggtgtatcgcttaaagtggcagcaatagcagttcccgccatggacattgattcttccatgattggtgcttcatggactgaatggggatttaatccaccaatttggttgtacacatcaaagctgtaaacggaaatgccaataacgataattgctgggatcgctgtccagagtatttctaaaggtacattaccttcaattggtggaccatcttcggtgtcacctggacggcgacggtattttaagacagagtagagtaaaacgccttcaactatgagaaatattcctatagagacggtcaacatcgcactaaatagaccatctatcaatacggcttcatctgctgcggctgcgggtaacagcccgtgattttgaccgtaccaaagactgaccagggttaggacgatgcctatgattagtgtccagatcgaacttggaattttcacggcttaacttaatggaattaactacgttgatttcacagtaactcacttactaaggtagtgcagggttgggtatcttgactctcaatgtctgaaatttttattaaattttttaactatgtcgctaatcttgagtaaaggtatccatagtcattttgtcaagaataaatgataattaaaagccaaatttaaggaaaattttagaaaattgccagtgaaatttcaataaatgtcaacaattaattattgctatcttaaaaaatgcctaaatcttacagcgaaaagttgtgttggtgattcaaagtataaggtaacgtcaacttttcaaccctagttcataagttagggtggagataggtgacaggggacaggggac

SEQ ID NO: 138 - DNA, 5997 bp, Sphaerospermopsis sp. LEGE 00249
  LEGE00249_253
gttttgatggataaaagcatttgctgatgtcaacactatactttattatttaattctgacacattttgcctaattttttagtcaacttattccatgtatacgtcaaatacttgtagttttgtatgtacttgtataggtttgtctagtaaattgtcaacttaggacaagctctatgaagttgcagttaattttttttactaaccgcaaagtacgcaaagtacacaaaggaagacagtaaattaagacgttaaagatttagtgcaatgttacagagaaatggtatagggatgatttgtttgggagataaataaagtatacttgatttttattctgactcctgactcctgactcctgactcctgctgtactatctttttctgtttttccgtttccatctttttagcaatattcgcagataacgaaaattcaaataacgccgatatcgctgtattacttccttaccaacaagtagcgcacctaaccaaaatacaatttctgcaaaaaccaataaagctggtactaatatggctttttgggcaactgcaagtgggagaaatggtaaaatgagagcgatcgctaaccagggtaaaaatgagactataattaaaactaaacccagcttttgcatcttttctgttaatgacagaatttgagtttagtgtttttatgtgtttggttggagtggcttactttacattaattttcatcatcaccaaattgttaatcctgtaaatcctaaaatcctggatatcctgattctgactaattcttaatccccgttgtcgcaataccgcgaattaactgcttttgtccaatcaaaaataataccattacaggaacagtagcaattgtcacagccgccatcatcagcggccaattattggtaaacagttcttgaaattctgctaaagccagttgtaccgttcttaactctggtctagtggtaaatactaaaggtttaaataaatcattccattcaccaataaaagtgaacaaaaacagagttactaaagcgggacgtgctaaaggtaacattacctgccataaaatttgtagtcggtttgctccatcaatggcagcagcttcttccaattctacgggaattgtctggaaatattgacgtaacagaaaaatcccaaaaccattaaccgcagtgggtaaaattaaagcccagtaagtatttatcatgtttccccacttcaaaaccaggaaaatgggaatcaccaataactgaaagggaatgactaaagtggccagtataactagtagtattgcttgtttaccccaaaatttcagcctagcgagggcgtaaccagccagggcagatgtgataatctgaaaagctgtaactgcgatcgctactaaggtagaattagcaaaagccagtaaaaacttgcctcgttcccaagcttcctggtaattggccaaagtccagttattttctcccccaactcccggtgtagcacccacaggagcaaaggaagtgagaacaaccacgaataatggtagtaaaactatgaatgctcctagcagtaacagtaaaaagctccaaaagttcgtgttttgccaattccagttgagtttagacatggttgataacttcaaaatcattggtttttcctagtcagactatagaaaacggggaataaaggatggaaatacttgacttttggcggggtgctaattggtaaaaattagtctaattaccataacttcttgttaagttaaattaaacaatagtgatgattgcccacaattgagagggtgaattaaatttcagtagcaaaataatttaggggtacggagtcaacctactatgcagcaacttgttgaacaaactcaagaaattgattttcagagcgcaaaatacaaagatgcttatagccgaattaatgcgattgtaattgaaggggaagaagaagcatatcataattacatcagattagctgaactgttgccaaatagtaaagatgaactgatcaagctttcaaagatggaaaacaaacacaagaaaggctttgaagcttgtggacgcaatttatcagttactcctgatatacagtttgctaagaagtttttctcaggactgcatgaaaacttccaaaaagcagcagcagaaggtaaagttgtgacttgtctgttaattcaatctttgattattgaatgttttgcgatcgcagcttataacatctacattcctgtagctgatgattttgcccgcaaaattactgaaggtgtagttaaggatgaatacagtcatctaaactttggcgaagtttggctggaagcaaactttgaagattccaaagcagaattagaagcagccaaccgtcaaaacctgcctattgtctggcaaatgctcaacaaagtagctgatgatgctaaaatcttgggcatggaaaaagatgccttggtagaagacttcatgattcaatacggagaagcattaagtaacattggctttacaacccgtgacatcatgcgtctttctgcctacggactggcaaccgtttagggacactggggagtggggagtggggacacttcgacaagctcagtgcatcgctggggactggggactggtgactggtgactggtgactggtgactggtgactggtgactggtgactgggaaaaaatcaaaactcctcaactcctgtaactcctgactcctgactcctgactcctttcaggaattactcattattcagacaccttatatagtatttttaagaattagagattatttctaataaccagctttgtataggacacgcctaaaatatcactaatgtttggtctaattggacatctgacaagtttagaacacgctcaatctgtagctcaagaattgggatacccagaatatgccgatcaagggctagatttttggtgtagcgccccgccgcaaatagttgatcacatcaccgttaccagcgtaacaggtcaaaaaattgaaggaaaatatgtagagtcgtgctttttgccagaaatgttggcaaatcggcggattaaggctgctacacgcaaaatactaaatgctatggctcatgctcaaaagcatggtattgatattacggctttgggtgggttttcttcaattatttttgagaactttaatttagagcagtttcaacaagtccgtaatgtcacattagagtttaaacggttcactacaggcaatacccatacagcttatattatctgccgtcaggtagaagcagcttcccagcaattaggaatagaactttcaaaagcaactgtagcagtgtgtggggcgactggtgatattgggagtgcagttactcgctggctggataaaaaaacagatgtccaagaactactattgatcgcccgtaaccaagaacgtctgcaagcactacaggcagaattgggacgtggtaagattatgggtttagaagaggcactaccccaagcagatattgtagtttgggtggcgagtatgcccaaaggtgtagaaattgaccccacagtgttaaagcaaccatgtttattgattgatggtggctatcctaaaaacttagggacaaaaattcagcatccaggtgtgtatgtgttaaatggtggaattgtggagcattccctggatattgactggaaaattatgaaaatcgtgaatatggaagttccagaacggcaattgtttgcttgttttgcggaatcaatgttattggaatttgagaagttatacactaacttttcttgggggcgcaatcagattaccgtagacaaaatggaatatattggtcaactatcgcttaaacatggttttagaccattattagtttaggggctggtgattggtgattggtgattggtgattgggaaacatgaaaaaaattgattacccagtcactattccccagtccccagtccccagtcactattccccagtccccagtccccagtcactattccctaactatggcaactactgaacgcaaacccctattattggattttgaaaagcctttagcagaactggctacccgcattgatcaaattcggcaactagcagatgaaaatggtgtggatgtttccgggcaaattcgccaactggaaactagagcgatgcaactgcgggaggaaatttttagcagtttgacaccatctcaaagactgcaagtggcaagacatccgcgccgtcctagtacattagattacatccaggcgattagtgatgaatggatggagttacatggcgatcgctgtggaggtgatgatccagctttagtgggtggtgtgggtcgtttgggtggacaacctgtggtgatgttgggtcatcaaaaaggccgggatactaaagataatgtcgcccggaattttggcatggctgcacctggaggctaccgtaaagcactacggttaatggaacacgccaataaatttggtatgcccattattacctttattgatacccccggtgcttgggcagggatagaagcagaacatcaaggacaaggtgaagcgatcgcttataatttacggcaaatgttttgttttgatgtgccaattctctgtaccgtcattggtgaaggtggttctggtggtgctttgggtattggtgtaggcgatcgcctgctgatgtttgaacactcggtttataccgttgctaccccagaagcttgcgctgctattttgtggaaagatgcagctaaagcaccccaagccgcagtagcattaaaaatcgtttcccacgatctcaaaaacttaggcattattgatcagattttaccagaacctatcggtggcgctcattctgaccccttaaccacagctaccaccctcaaacaagctttgttagataacttggacgaactcaaccgcttaacaccagccgagcgccgtcaactgcgctatgagaaatttagaaaaattggtgtgtttaccgaaattgctcaataaaaataataactatatctgattagcacttcaacaatgctataattgcctatagcttaaagattcttaacaatctgaccagctataggcatttttttgtgtattcatgaaacagcttgatataagagcctaattattcacgtcaagactttcggatctgacaggtaaggctaataacaggcaatatacccatattgataaacgattctagcaatattgagcataaaatcaactgattttaagaattatttaactgattgggtaggtagtgaatagcaaaactgccaaaaaaattggagataccatgagttttgagcagaaaagacgcgctttaattactggtgcaagcagtggaataggcaaagcaacggctttagcctttgccaaggcgggaatagatgttgctttagtcagccgttctcaggagaagttagaaggggtggcagcagtagcaaaagaaataggagtagaagcaaaagctttcaccgttgatctgggtagtgttgcccaagtaaaaaccaaaattcaggcgatcgccgatgaatttggcgacatagacattttggtaaataatgccggtataggatacactgccaatttaagcgatacttccttagaagactggcagcgggtaatagatttaaatattaccagcgtctttcagtgcatgatggcaattgtgccaggaatgaggcaacgaggtaaagggacaattattaacattgcctcaatagctgccaaacaagcttttgctggttggggggcttactgcgtcagcaaagctggtttactcgccctttctcaaacattggcacaagaagaacgagtccacggcattcgtgtaacaggaatttgtccaggtgctgtcaatactgaaatttgggatacggaaacagttaatgttaactttgaccgtaccaaaatgttaactccagaaatagtagctcagacaattctgcacactgttttattaccacaagaagcagtcattgaagaattaacattgatgtctaatgctggtgttctttaattgttaggtgactggggactggggactggggactggggactgggg

SEQ ID NO: 139 - DNA, 5716 bp, Sphaerospermopsis sp. LEGE 00249
  LEGE00249_265
ccttcgacttcgctcccttcgacttcgctcccttcgacttcgctcccttcgacttcgctcccttcgacttcgctcccttcgacttcgctcccttcgacttcgctcccttcgacttcgctcagggaacgggaactgttgcgctggttgagcgaagtcgaaaccagcttccatcctgcttcttttaataataaatctatgatggacttgcgggtttcttgttctgaatagtcgtgtgtatctggttggctaatatttacttttttgactgctgctaattcggctctgagttgttttatggtttcatctagagcgtgtttatctgttagtaatagggagagtttttcatctttttctttgagttctattgctaatttttgcagttcttgagttcgacttcgctcactcaccggagttttgtttttctcactaagtttagtttgattttgttcactaaccggggttttatctctctcactagctggagttcgactttgctcactcaccggggtggttttggtaacttgcggtatggcgttaatatcaaaggttaaacctggttctggtttgctggtgcgtccgtaggtacgggttaaccaatatactatatgaaaaaattctttgactgcggtgaggctatcgttaacgggtacttttctttcatcatgaacggcgttgttaccaattttaatgatgagtttggctttgttaaatatggcttgacctactaattgtttgaaggtcggttcatggatgagggcgctaatgttatcttgatagggtaagtttaatgtattgtcgtatttatagagccagtttactgttaattctaaggcgcgacggctataaaaacaggctgtccgggggtcacggtaggctgttttaaaggctttgtgagcagattcgtaaatggtgggaaattcagcttgaagaaaggtaaactggctcatttagttaataagctgttgttagtttcaatagattatactcattatattcagtaaatatgttgatttcaagctagaatttcatgggatgttgagctacatttagaatataatatttcttatgatgtttctaaggccagcaaataaatacggcaaatgacagcatataccctaaatttacctgaacagttgaagcatgaaattgagcaattagttcaaagtcaagggatttcgcttgatcaatttattctgtgggctgtaacagaaaaagtcagtaccctgaaagcatctttttcacagattgcttatcgtcagggagcaaatgggcaacttgtaccaatcattaaaggtacaggaattagagtccagactgtggtgatagcttcccaaaaatggggtatgagtctcagtcaaattgctgatgagtatgagctaaatgaggcacaagtaaaagaggctttgagtttttatgtagtcaataaggagcagattgatacagcgatctcttctgagcaatccttagaaagtgccaatggttaaactcaagctgcatctggatgctgatacctccagtaaatcactacatttagcattggtgtctaaaggtcatgatgtcactcgtacaccaaatgactggatgcctttagatgctagtgatgaaattcaattattacgtgcaacttctcagggaagatgtatttttactttcaatattagagactttattgttctagcagaaaagtatccgcaacatggtggtattatccttgctgctcagaatagttggtcactttccgatttaattatggcattagataacttattatctgacgcagaagcggcggattgggttggtcaggtagattggttgaatcggtggcgaaagtagttttagaagtctaatatttctcggtttttttatagtgtaaatcaattttttgaggttatagttctcctttaaatgcacgatgttggagggatgtaaagagcgcatctagttctgataatgaggcgcggtgtgatttttttagttcttctactgcttcgactcttttagcaaattctttttgaagagatagcggggggagtaaaagcgaaaaaccgcgtaactgtgtcatattaattgtggcgattcctgttgtttgttttgcctgttttagaaagtatttctttccgcgctggctaccaattaaccaaattaaaaacaacggatgaattagattacagttaatacgaacccgaaaaatgtggttttgatggatacattcaggtaattctcccttccatatagttcctctacctaacttatcaggatctccgccttcagtaagaactaaatcatttacttccaatctgtatcgtgtaatttcattttctgttgcttctattgtttttattacactcaaatctagtttatgttcttgaacattaacaacagctagataaggaacttcacgaacactctgcccattcaactttcttccctttgtaattcctgaaactatatcagcaacctctcccaaagttttatctgcattccacccctttggattcttaacaggatctccgaacatttctaaaaaaatggattgagtgagggtgtcgagttgtgcgatcgcttcctttctttttctcctcaactcctccgcttgatctaatatctccgctattcttttctgttcttctaatggtggtaagtagaactttgtactcagaaattcacctctatttacgtgctgcattgttgcaccatgtaaatgttttttcatatcaagaattgctacttccaatccatgacgtaagtaacgcttatcaactatttttgtattaggtaaaacacgaaatatatgttgattaagtaatgcttcttctgagtcattccattcaaaaacaccaagggtagcagaccatgaaacaagcaagtctcccggttgaactcgtacaagttcggaaacagttctttctgttctattaaagggcttatttggatctgttaaattctggattctaatgattcgtaaacctgattctccccaatcttgtggtttaaaagctgccccattaataaattctgctacagaaccgagttttacaaaagtgttactcaccctaacattttctccaaatctttaataaacaacattgatattaaaaaataaaatcttatatataaataacctcaactaaaactctaattgtgcatgaagaaagtgcttttttgatgaaaaattactaatttatatttaaactagaaataattttacgtacaggtaaatactcaacacgattcatccgtaataattgaacagttacccgaccaattgctgttagaggttcaatcataccactttgtgaatttaaaataaaatgctcttgccaaatatcttttctaggattatagagtctcacagtatcaccagaatcaggatcaattgaagcaatatcactacctttagcttgattacataaggaacaagacaaagctaaattttctaacacagttgcacccccatgtttttctgcaattacatgatctatctgatgattagctaaaactaacttttctggaatcaaacaatactcacaacacccctgagcgcgattaaacaccatttgtcgcaaattattagaaatataacttttactcataacttgcttgtaacttcagtaaagcctgagctttagcaagacggactaaatgctcaataaactcataatgttgccataaaacaagatcattttcatcccaaccttgatggcgatttttctctaaaagagcatcaattttatcctgaacttcagaagaaagacgaagagataaaatttgttcaggagatggcaacattgccaaaaactctaaaacctcagctaaaccagaaataccacccttgggattagcattaatttctcgtaaccctaaagccaatatttttggtaaatcttccttgtgagattctaaactctctaccatttcatcaggaatatctaaagtaattcgcatagttttttacctcaataaaatcaattatatacacatttttattatccttgtaataactcatttacagttaacttcacctcagaaaacaaaggggaacaaatcacctcatcacctgtaaaaacctgctcttcatacaaaccttccacccactctaaaacagtcaccttttgcgccatcgggtcaacaatccaatattcattaataccccgtgctgcatactcagaacgcttgtaacgataatctcgcttttcttgattaggacttaccacctcaaccaccaacaaagggggcggcatatccattaaaattaaagagcgtgtagcattttgcatcacctgagctaattcttcagaaaataccaccaaatcaggaacacgcacccccaccatgcgactatttacagctatttctgttttcatactcaagcggtaatagggaatacctaattttagaaaataggcaactaaaaacatcgctatgcgccgattgatctcactttcaaaaggcataacaattaattccccattttccaattcatataaataatccgtcccatcgtcataattaagaaattcctcaaaagtcattttttgagcagttgtaactgtcatgaccattactcctataaactgcttatcttactattttcttactattttaatttcactccccgttccctgcctgaccaacgttccctaagcctccccgttccctgagcctccccgttccctgagcctccccgttccctgagcctccccgttccctgagcctccccgttccctgagcgaagtcgaagggaacacttttcctaactcaaatgagcaaaccgactgtaatgagtttcattttgacactcagccaacttatgtaataaatttgtatttcctaaaatcaaagcttgttttttcttgcgactccaaccttgtatttgtttttcccgttcataagcatcttttacaagctcataatactcacaaaaaactaacttaacaggtaagcgtttcgctgtataatttgctccataaccattttgatgttcccataaacgacgatctaaatccattgtactaccagtgtagtaagtaccatcagcacattcaataatatatatatatgccatcggttaatgattgaattttttaagattattttatacttaaatctggcaatgtttcctctctctgttcccttcgacacttcggcttcgcacttcggcttcgcacttcggcttcgcacttcggcttcgcacttcggcttcgctcagtacaagctcagtacaagctcagtacaagctcagtacaagcttcgctcagggaacgggcttcgctcagggaacgggcttcgctcagggaacgggcttcgctcagggaacgggcttggattttgttcccttcgacttcgctcagggaacggacttcgctcagggaacggacttcgctcagggaacgggcttcgctcagggaacgggcttggattttgttcccttcgacttcgctcagggaacgggcttcgctcagggaacgggcttggattttgttcccttcgacttcgctcagggaacgggcttcgctcagggaacgggcttcgctcagggaacggactccgctcagggaacgttgcctgagcggagtcgaaggcaacactaccgttcgtgctaaactgaacaaatatccatctgtttagaatggcactttaaaaggcagaacctttactggtgtaacggcgacactcgctatcccatttgcaaaagcatttgggaatacttttctga

SEQ ID NO: 140 - DNA, 5590 bp, Sphaerospermopsis sp. LEGE 00249
  LEGE00249_270
ggactggggactggggactggggacagttaagagtttttagcaattaccaattaccagccctaactaaataactaacaacataattgatcatgactttagatttcattagaatttcgccaaaaacaaagcaaaaaccagccgcgctcatcgtcacgttacacgggtggggtgcaaatgcccaagatgtagaatctttatcctcttatttcaatttacctgattgtgaatttttgtttcccaatgccccttatccctatccctattccccagttggtagggcgtggtatgatttgcgggacgagaatatgtatcaaggattgccagaaagtcgtcaattattgatagattggttgcagtctttagaaagcatgacaggagtgcctttgtctcgcaccgttttgagtgggttttctcaaggtggtgccatgacgttggatgtaggtttaactttacccttggctggtttagttgtcatgagtgggtatccacatcctcaacttgctaacttacaaaaaggcaattttccacccacattaattatgcacggcacacaggatcaagttgtaccattgtcagctgctaccaaagctaaggcagtggcagaagcattaggagtggtagtcgaatatcatgaatttgtgatgggacatgaaattaatttagaaatgctggaggtattgcgaaaatttgtgatcaagacaattgcggatggctaagttatcaattttttacaattgaggagaaaaatcagctaaatatttacaaatttcatgcccactaattagtaatatagattgggtgggatattttagctcatttagctcaactccacctacggctgaatgcgagtgctgcaaaagggaggggcaagcattatgacaactctaagcatttccagaaaagaaattgctgctatgacagcaacagatataaaagatttggctactcgtctggaattggataattatagcaatgcttttgagggtttaaatgattggcatttactgcgagcgatcgcctttcagcgtccagaattagttgagccttatatctacctattagatttagaaccctacgacgaagcatagaaattttatctaacaattcagaattttgtaagggtttggccttgctaaacccttatataaatcattttatgcaaataatcattacatgattcaaacagatccatacaaatggatgcaataacaatacaggcttatgccaagcgagccatgctatgaatcctggtaaaccgatacaaattcttaaagaccttgctaatttaccagaatttaaaagagtaataaatctaagcaaaaagaaaaaacaacgtatggatgatcatgaatttgtattgggttttattgctttcattttaaccagttataaagattatccagtaaataaaggtcgcaactattttttacatgaagctatgaaaaaattaaacaaaatagactctaatttgatagaaaccatagaaaataagtttactatagcaatgaaagcagcttataatatttttgaaaatactgcttttcggaaatcttcaagctctcctgtgaataaatctctttttgaatcttggtcagtcactttaagtgaattaaatccacaacaaattaaaaaattaatcgagaataaaacaatcttaaaagaaaaatttagacaaaagatgaaagatgaccctaatttccttaaatctgtatctcaagtttctagtaaagttcaatatcgttttgaagaaattaatcaaatagttcaagaggttttatcatgttaagttctttaactttaaaaaattttaagccatttgaaaaccagtcttttgcattcaagccattaacattcttttctggattaaatagcactggtaaatcgtctttactgcaatctttattactgttacgtcaatcctatcaacaagatttattagatgatataggtctggcattaaacggtgatttagtatctataggtacaggaaaagatgtactttttaaacgagctaaagaagattcaatcacatttgaagttggtataaataataatattcaaggtacttggatttttgattatgatcgtacatcagatgtcattcaaatatctaatttttctattgttgatgaaaaaatttataagtctagtctgtttacagataaatttcattacttaaaagcagagagaatagcacctagaaattatttccaaatgtcggattttcaagttagacaacatcaacaaattggtagtcaaggagaatttactgcccatttcttagctataaatgaatataaaaaaatttcccatagtcaactattacatccatcaatacagtctgatattttaaaaagtcaagttgaagcctggttaggagaaattagccctggaacaagaattgatatagagctacattcagcaatggatttagtaaatttacaatattcctatgaagataataatttctatcgttcaactaatgtagggtttggaattacctatactttaccaattattgtcgccatattatctgccgcctcagatacattgattttattagaaaatccagaagctcatcttcatcctagaggacaatctaagatgggagaattaattgccttagcagcaagttgtggtattcaaataatattagaaactcatagcgatcatgttctcaatggtattcgtaaagcagtaagacataataaacttgaggctgataaagtgcaaattaactactttgaaagatatttaaaaaaaggacaaccaacaacagaaattattactcctcgaatttatccagatggagggattgataaatggcctgatggttttttcgatcaagctgaaaaagatttaatggagttactataaatgcactttttgattaatgagctttcttttattggacaagcatctaataattatgaagctgatgaattaatgaaacatatttttcaaattattacagaaataagtgttattcaaaatggtgatccgattcaaactcatagtagttttgcttctcaaaatatatcctctgagttaactgttagtcaatggatttttgagaataaaaattcaaaaaattctgaacaacaaaaaatcgctatgattctactgagacttttaagtaagggactttttgttgatgtacaaaatttactcaatgattgcaagtgtcattatcagaatatagatgttacatcaagttcattagctggtgctgttaaacttccaggaatattaattagtttacaaaataaccctgattttgttacagaaaacattgaagttgaatttcaagaaggtacaaatgatttagaaaatagaactgtcaagaatttaactcaaattacctaagctatcaaaatatgtcctcgttataaacttcattctaaacatgatctttcaggatattggaaaaatgctacacctatgaatttaaaagatcaagaagctcaaaaagtgttaaatagttctatatgtagcagtaataacaatagtgaaaaacgttatggatatgataaaaaaactgataaattttatgtgtttcattcagacaatacctttgatgaacaaggttatccaacctatcatggatttccaattcctgaagatcaagtccctaaagaagtattaaataaaataaagagataatgccatcatttataaatcccaaatccaaaaaagttattgttgctatatgcggcggtattgcagcttataaagtttgtgaattggtttctagtttgtttaaatctggggtagaagtgcgagtaattctcacaaattccgctcaagaatttatcaaacctttgacttttgccactttatcccgtcatcaagcttatactgatgatgatttttggcaacctgtttattctcgaccactacatatcgaattgggagaatgggcggatttaattgtcatcgcgcctttaactgctaatactttagctaagttagcttatgggatggcagataatttattaacaaatactgttcttgcttctacttgtcctgttttgttagcacctgctatgaatacggatatgtgggaacaggtagcagtacaaagaaattggcagcaactattgacagataaaagattttatggtatacaaactggttctgggttgttagcgtgcgatcgcatcggtgctggaagaatggccgaaccagaagaaatatttgtttatattcaatctttattgcatacccaaggaaaaagagatttaagcgggaagcgtgttttaatcagtgctgggggaacgagagaatatttagatccggtgcggtttataggcaatccctccacgggtaaaatgggattagcattagcacaggcagcattgcatagaggtgcaaaggtaacattagtgcattgtccagcgagttgggatgcacctttaggagttaaagcaatttccgtagtgagtgcggctcaaatgcaggcagcgatgttaaaagagttaggaaatgcagatataatagtcatgtctgcggcggttgcggatgtgaaaccgagagattatagtgtagagaaattacctaagcgatcgctccctgaaaatttaccccttgcaccagtaccggatatagttgctgaactagggaaaattaaacaaccccagcaattattaatcggttttgcagcacaaaccggggatattatcacacctgcgaaagagaaattacagagaaagaaattagatgcaattgtagccaaccctattgataaaattggcagtggttttgggagtgatcataatcaagcggtatttttagataaagaaggaagagaaatagaaattcccccttgttctaagttagaaatggcgcattatttgtttgactttattgtttacagcaggaggcagtaggcaggaagcagggggaagttaataacccaatgcccaataaccaatacccaaagacaagaaaatttttttgatcaacccaacacaattccaaaacggcatactataatagaaatataaagcgcatggggctttaacggtttcgacaggttggcgaaagctgctctgtgattcaggtcgagagtgagtctcctctcgcaaatcaaaggctcaaacaaaaagtaaatgcgaacaatatcgtaagctttgctcgtaaggaagccctagttgctgcctaatagcctcttataggtccgagcgtctctggtttgactccgttaaggactagagacctaacctcaacggatgctccagtaagcgttctctggttggcttgctggctaagactaaatcagagcatcctacgttcgggacaatgaacgattcccgccttgagggtcagaaaggctaaacctgtgaatgagcggggggtaaatacccaatttggacatgggttcaattcccataagctccacttaaaataattaacaagtccacttacatatcaaaatgtaagtggattttgtttttgaggtttaagtaagtgggtgttaaaaattttttctgtttcttgtaggggcgaagcattcgggtgataacctatcgctgaaaccagtttatattctgtccgaatgcttcgcccttacgattaatgaatcggtgt

SEQ ID NO: 141 - DNA, 5411 bp, Sphaerospermopsis sp. LEGE 00249
  LEGE00249_281
cgatttttgataattctttaattttcaattatcaattgtcaattatcaattcccaacgggttttcctggtgtctatggcgcggtggaaccacactgatcccttcccgaactcagaggtgaaacgctgttgcggcgacgatagttgaggggttgccctccgtcacaatagctcgatgccaggtttaatattgtacattccccttcattttcataatgagggggtttgttgttttgtaaggactaaagcccaactacaatatcagaagttttatgtttttttactcaggtttttccacgacttagcaactcctaagtatcgaaagtatctaaaaaattctcctatattaagaaatgttgtcaagcattgctatgatattatacagtgttacaattgatagcggtaaaattataaatagttcaatatggcaattatgataccgttctctattcctgacaaagctagtcagggagaaaaaagattatacaatattctcaaaaataagctatcagataatttttatgtttggtatgaacccagaatagatgatcgttatcctgactttattattttatcccctgattttggactacttgttatagaagttaaaggatggtatctcaaacatatacttacagcttcctatgatagttttgaaatagagaataatcaaaatgatttagagacaattcaaaaacagaaatctcctttacgtcaaggtaaagattatcttgataaactattaaatcttctaaaaaaatctagagtattaactaaccaatcaggcaaatatcaaggaaatttatgttttcctattggtgttggtgcagttatgtctaatttaactgatgaacaggctaatagatataatttaattgatgtactaccaataaaaagtgtaatttatcgtgatgaattattgacatgggaaaaagattgcattaaagaagaaacaattatccagcgttttcaagaaatgtttggaattaactttgttttctctcctttaacgcctgatcagattagtaccatcaaaggaattatatatcctgaaattgttattagacaagaaaaagctacattaaaaagtgttaattctgaattttcaattttaccaagcgatattatattaacaacattagacagtaaacaagaatctttggctaaaagtataggagatggtcatcgtatcttctttggggtgtctggttcagggaaaaccctattattaatatcacgcgctaaatacttaattaaccaaaatcataatgcaagaatattaatactgtgtttcaatgtatgtttagcagcctatataaaatcagttcttcatcaagattcacaaaataaacactatcaaaatattgaagtcggaaattttgatgtatgggcaaaatctgtcttaggtacattacccagtcaagttcaaggaaatcgggacgaatatacaggtaaaatagttattgataaattatctgaatattcaaaagaacaaaaatgggatgctatttttattgatgaagctcatacttttgttcctatttggtttcagtgttgtgtgaatgctctgaaagatagtgaaaatggtgatttaatgattgttgcagatggcaaccaaagtctttataaaaggtctaattttcagtggagagatgtaggagttaaggcacaaggccgtacttttagcaagaaatttgacttagacaaaaactaccgtaacactcatcaaattctatcatctgcattgagtattttaaaccgtgtctctgatttagttgaacctttagaagatgaggatgtaactttccctctggttaaacccaatttagcattgagacagggggataaaccaaaaatttatataagcagcacacctgatgaacaagaaaaatctattatatcaactatccattctttaaaatcattaaatattgatgatcgtgatatagctattttatatagacaagcaggtaagaaggatgaaccaagattaaattctattatccaaaaactcaatcagcaaggtatatcaacttattgggttaatcaaaatgataattctaagagacaatataaccgagaaagagaaggtgtgagaatgataactatgctttcatctcttgggttagagtttaaagcagtcttattaatttggttagaacagtttgatgattctattggtaaaaaagacgctgaaattttagcaagaaggcagatttatgttgccatgactcgcgctcaggaatatttaagtttatatattaatcatcaatctaaactaacatctgagttaaataataatttaatttttgacatattcaagcaatagaaatattactgtatgagggattaataattatgactgaaaacgaattaatgaacactgctactgaactacttagacagcaacaatggaaggaagcaggaacactttttcggcaagtatgggaaaatgaaaataatgcttatgctgcaagtcgttatctttgttgtttacgtaaaggtgggtatccatcatggtctattagacaaggaaataaagcacttaatcaatttcctggtaataaatatattaaagatgaattagtttgggcatattatgatgatactattaaacccgaagcatctaaagaaaatttataccaactaatagaatctgctaaaacaattttgagtttacaaccaaatactttagctaaagaattaactgtctttgctgtgattaaaactgctaaacaaaaagagaagtgggatattgttctggaatggtgtaattttataaatcctgaagaattgaatgatgaaccaataattgttgatgctaacagaggcggatctagaaaagaacaatggttctttgctaaggtaaaaagtctaattgaacttgaattatggaaagaagctcgtgtttgtgcattagaagcaattaagatttacccaagagagatgaatttttacagattctctgctttggcattagctaatctaggagaagaagaaaaagcaattgttgagttgaaggatatcctactaaaacatcgagaagaatggtatatttaccaggatttatcagatatatatttaagtattaatcagccagaaacagccctaaagtttgcttgtcaagctgcattatctccaggagaagataaaattaaagtgactttatatgaaaaaatttgtcagcaaagcttattattaggaaagttagaaatgtctgcacaacatttagaactatctaaagcaattcgagaaagcgaggggtggaaagtcaaagataccttacaacaattacaaacaaaaattaaccaagaaatcactaaccagcaatcaacattcactaaatttgagggggatatcactaaattaaatcaaatatgtcgaaaattctggaaagaaattctatatcaggatattccccgttattgcggtacaattgaatcattaccacctaaccaagctcatggatggattatagatgatactggaaatcgtgtcttcttcttacaaaaggagttacctaaatttttgcgtaaagaaaagcaaagagtaagttttattttacaagaaagttatgatagaaaaagagatagaaaatcatttaaagccgcagattttcagataccaaaacaataatttatcgaagcgaatatgtgagcaatttttgtcaagatcattaaagatgaaactacttaggtgagatagatacccgacttcttcaagaagtcgggtatctaaaggtctatcttcacctaactcgatgcacttgtataaaaccgcaaagcaaaccgccaaaaccaagtagaaacaaaaaataacaccaccgctaaaaatacagcacccataaaccaacttaactgactttcacctaacatagcttgcgcgggaactgttgttaaaaatgcaactggaactacaaaggtaaagaaaactctataagctgcgggataagctacaatcggatatctacccgcttctaataaacctcttaatacttcagtaacgttgtatattttcacaaaccatatactggtagaacctagcataaaccataggctgtaaagaatgactaaaccgcaacctaaaggaaatatactcaataaataatcatttattcctaaacccaggcgtttacctgcataaccaatgatgatacaaccaaagattaaatctggtagtccccacggtgatagggtgtgagttgaaagccaaaattgactgcggatgggttttaataatacaaagtctaatgtaccttcttgcacatgacgaactatgcggtttaagttgggagcgaggaatgtagctgaaaaaccttgcaagagggtgaaaattcctaaaactattaaagctgcatcccaagaccatccaggaaaggtgtaacctgtgcgataaaataagaataagccaaaaatactacccgcaagattgcctaagctgctcaaggtagctatgatgaagttgagacgatattccatctctgcggaaatggctgcgatccagaaaagtctgattacttttaggtatctttgcatttttttgtttaacttcttacccactgcatttaagataactttatctcaacttcatactgttttttaatttcacggattgcataaggttaagatgttggatgcaacttctctgttatgtctgattttatgcaggttgtttgatggcaatttgcattttatcaaagaaaatagggtcaataaaggttaaaatctctttatgaggaactataaaagctattatggctaaactgtctaacgaattacaacgctatttttttgaggaagaacatcctgaaaaggtaactttggcagatattttgttactagctggggaaagaatttttggatttttgttggttattttgtctttaccttctgctttaccagttcctgcacctggttattcaacgccttttggtgtgctgattgttttgttggcggtacagttggttgcaggtgctaaaactccttggctacctgctaaaatgctaaaccatcaaattcaactttctaccgttcaagggtttctgaaagcgggactgccttggttgcggagaattgaagcgatcgctcgtccccgtatttcttatatttgtactacattaccaggtagagtaactattggggtggcgatcgctctcatggctatttctatgatgattcccatccctggtactaatactttacctgcaatgggcatttttgttactgcttttggtttatctgaagatgatggtgctattagtttaggcggtttggttctgtgtctgatgggcggaattttaactacttctattttactagctttggtctggggtggttctagtttattggatgtgatcaaagcttggttaggtaggtaggtgactggggactggggactggggactggggactgg

SEQ ID NO: 142 - DNA, 5330 bp, Sphaerospermopsis sp. LEGE 00249
  LEGE00249_283
aaaaccatataaaacaaaaaaccccgttcgttagaacagggtttcaaaaaaaaggcggcgacatactctcccacattactgcagtaccatctgcgcagtcggacttaacttctctgttcggaatgggaagaggtgagccccgacgcaataaccaccttaagaggttacaattgctttaggcaatcattatccaattcataattactaattcgtaattgaatcaatatcttaacatactgagataaaaatcattcttagaaagtttcttctcccgtccgaagacgggagaaaagcgtacataagcttacgggttattagtactactcgactatgacattactgcctttacatctatagcctatcaacgtggtcatcttccacgacccttaaaagaaatctcatcttgtggtgggtttcgcgcttatatgctttcagcgcttatcccttcccaacgtagctactctgcggtgctcctggcggaacaacagatacaccagaggttagtccaattcggtcctctcgtactagaatcagatccactcaaatttcttgcgcccacagtagatagagaccgaactgtctcacgacgttctgaacccagctcgcgtgccactttaatgggcgaacagcccaacccttgggaccttctccagccccaggatgtgacgagccgacatcgaggtgccaaacccccccgtcgatatgagctcttgggggagatcagcctgttatccccggcgtaccttttatcctttgagcgatggcccttccatgcggaaccaccggatcactatgctctactttcgtacctgatcgacctgtatgtctctcagtcaagctcccttatgccattgcactctacgcacggttaccaagcgtgctgagggaacctttagaagcctccgttactcttttggaggcgaccaccccagtcaaactacccaccaagcaatgtcccccacattcgcggggttagacctcagataagcaaagggtggtatttcaacaatgactccacaacgcctggcgacgccatttcacagtctcccacctatcctacacatcacttatccaagaccaatactaagctatagtaaaggtgcacagggtcttttcgtcccactgcgggtaatcggcatcttcaccgatactacaatttcaccgagctcatggctgagacagtgtccagatcgttacaccattcgtgcaggtcggaacttacccgacaaggaatttcgctaccttaggaccgttatagttacggccgccgtttactggggcttcaattcaatgcttctccgaagataacatctcctcttaaccttccagcaccgggcaggtgtcaggccctatacctcatcttacgattttgcagagccctgtgtttttgataaacagtcgcctggaccttttcactgcggccagcattactgctggcgacctttctcccgaagttacaggtctattttgcctaattccttagccatgaatctctcgagcaccttaggattctctcctcgactacctgtgtcggtttacggtacgggtactgttaatctaagtttagaggtttttcttggaagcccttaggtacactatctctttggccgaagccgctgagtactatcgcatttccccaaagcccgtggatttgcctgcgggccttataggtaggtgctttaacgaactattccgtcagttcgcggtactttcatcactccgtcaccccatcacaattaacagtagtacgggaatattaacccgttggccatcgactgtccctttcgggttcgccttaggacccgactaaccctcagctgattagcatagctgaggaaaccttagtctttcggtgtgcgggtttctcgcccgcattatcgttacttatgcctacattttcttttctaaccagtccagcatagctcgcgctacaccttcaaccctgttagaatgctcccctaccacttgtattactacaaatccatagcttcggtagtatgcttatgcccgattattatccatgctcgtccgctcgactagtgagctgttacgcactctttaaatgaatggctgcttccaagccaacatcctagctgtctgggcagacaaacctcgttttttcaacttagcatacatttggggaccttagctgatggtctgggttctttccctctcggacatggaccttagcacccatgccctcactgctggtaaacattatatagcattcggagtttgtcaggaattggtaggcggtgaagcccccgcatccaatcagtagctctacctctatataacttataaccagcgctgcacctaaatgcatttcggggagtacgagctatttccgagtttgattggcctttcacccctacccacaggtcatccgaagacttttcaacgtcaaccggttcggacctccactatgtgttaccacagcttcatcctgcccatgggtagatcacacggtttcgcgtctaccactactgactaaagcgccctattcagactcgctttcgctacggatccacaccataagtgcttatccttgccagcaacggtaactcgtaggctcattatgcaaaaggcacgccgtcacccaacttgtaggctccgaccgcttgtaagcgtatggtttcaggatctatttcactccgttattcacggttcttttcacctttccctcacggtactggttcactatcggtctctcaggagtatttagccttagcggatggtcccgccaaattcagacagggtttcacgtgccccgccctactcaggataccactatccttatcttctcttacttataccgggctatcaccgtctatggcctacctttccaggtagttctaattcaatccgcaagaaatgtcgtggtcctacaaccccaaaattgccgtaacaactttggtttgggctaatccgcgttcgctcgccactacttacggaatcacttttgttttcttctcctccgcctacttagatgtttcagttcagcgggtttgctctcctatcggagtgacatgtcttcaacatgccgggttgccccattcggatatctgcggatcaattcgtatgtgccaatccccgcagcttttcgcagcttatcacgtccttcttcgcctctgagagcctaggcatcccccatacgcccttattttgcttattgtacttgttacttattacttatcgctaagtaattcgtgttctttctactttttaaatgtattttttatctcaatatgtcaatgaactttattaatttgaaaatttgatgatttgagaatttgaaaatgaatcttcaaatcttcaaattgattaatcttcaaatcaattcgtggagaatatcggagtcgaaccgatgacctcctgcgtgcaaggcaggcgctctagccagctgagctaatcccccaatcttagtgatgagttactagttatgagttatgagttacataacctctcaacccctagaatttcctataagcatactagtagtcccgggcagactcgaactgccgacccctacattatcagtgtagtactctaaccagctgagctacgagactctgtattttgcttattttatattttgaattaacagcgagagtaaataaacttcgtgactcttatatttccagtccttctttttcgtctctagaaaggaggtgttccagccgcaccttccggtacggctaccttgttacgacttagccccagttactagttttaccctaggcagctccttacggtcaccgacttcaggtacccccagcttccatggcttgacgggcggtgtgtacaaggcccgggaacgtattcaccggatcatggctgatatccgattactagcgattccagcttcacggagtcgagttgcagactccgatccgaactgagaacggttttatagattcgctcctactcacgtagtggctgctctctgtaccgtccattgtagcacgtgtgtagcccaaggcgtaagggccgtgatgatttgacgtcatccccaccttcctcacagtttacactggcagtcttgctagagttcccgacatgactcgctggcaactaacaacaggggttgcgctcgttataggacttaacctgacacctcacggcacgagctgacgacaaccatgcagcaccttgtaaattgtccgaagaaaagtctgtttccaaacctgtcaatctacatttaagccttggtaaggttcctcgcgtatcatcgaattaaaccacatgctccaccgcttgtgcgggcccccgtcaattcctttgagtttcattcttgcgaacgtactccccaggtgggatacttatcactttcgcttagccactgaagttgcccccaacagctagtatccatcgtttacggcgtggactaccagggtatctaatcctgttcgctccccacgctttcgtccatcagcgtcaatccacaagtagtaacctgccttcgcaattggtattccatgtaatatctaagcatttcaccgctacactacatattctagttacttccttgtaattcaagtctggcagtatcaatggccgttccacagttgagctgcgggctttcaccactgacttaccaaaccgcctacggaccctttaaacccaatgattccggataacgcttggatcctccgtattaccgcggctgctggcacggagttagccgatccttattcttacggtaccgtcaagctccttcacgaaggagtgtttcttcccgtacaaaagcagtttacacaccatagatgcttcttcctgcacgcggcatggctggatcaggcttgcgcccattgtccaatattcctcactgctgcctcccgtaggagtctggtccgtgtctcagtaccagtgtgggggatctccctctcaggacccctacctatcgttgccatggtaagccgttaccttaccatctagctaataggacgcatgcccatcttttaccgttggaactttaatatatcaaacatgcgaataatatataccatgaggtattaatccaaatttctctgggctatccctctgtaaaaggtaggttgcatacgcgttacgcacccgtgcgccggtctcaaggttgcaagcaacctctacccctcgacttgcatgtgttaagcctgccgctagcgttcatcctgagccaggatcaaactcttcatcgtatgttgtttgctcttacgagctgttttatagacaaaggctagtctttttcaaatctctcgattcacttactctcttttttttctgtcttaaaatctcttttaagacggctgtcaattcaatatgtctatgaacgtattcttcttttttta

SEQ ID NO: 143 - DNA, 4904 bp, Sphaerospermopsis sp. LEGE 00249
  LEGE00249_307
taaatcttaacttgagaaatatcgcgtctggctaaggcgtgcaagtctactgagggataactgctcccatgctcccgttgaagtagaaagtaaagtctagctttgtctaggttttatatagcaggtaacaatcaatggtgcagcagatgctcaagcgggtaattcagtggctcaaaaaattgtttcagggtttgtttgctaggaaacatagtcctaaagcagtacagcagaatattgagaaaacaaccgcaccacctctgagtgatacggatctagaatttctgtttacagaactgttagcaggagttcatcaagctagaggccaggcttggacgcaaaactggttacataaaattgaacatcgtgtcagcactcaacaatggctagattggctaaatcactttggagagagattattagcatctactaaacctcataatgaattagcggcacggttagtacagttgggtgagttggaggttggtgaagttggcgacctggcatacaatattgggatgcaattgctgacacgcacccaagcagaacccatttgggaatatgatggacccgatgctgtcagtccaactgtctctgaggagaattttccagaggaagaataccaaactgtgacttgggatgaattattggagattttgcaggaaaatgagatcttacgtcagcaaattgtccaagatttcgctattgaaagtgatgacccacaacaaattattcaggtactcataaataaatcccagacaatgggtgaatctgctgcatcggaaaagtcagatcaacccattcccgaaggaattgatgacaatattaggtaattaaatgatttttttgacacaaggatagctacaatctaggagaaagaaaatccaagaatgtggcaaatgctcaggtggctattgcagtggcttaacaacttattcaagtacccctttggcagtcgtcgaactcatgagttcgacggcgatgaggtgtctatggtagaaaagtctctaccagaattaaccaatgcggatctggaagtattgtttaatgagttgcttgaaggtgtacatcaagcacggggacaacaatgggcgctgaagtatttgcagcgaatggaaccccggatcactgttgagcgttggatcgattggttgctgatatttgctgaaaagttgctttcttcaccagcgcccaatagtaagatcgcaacgcgaatggtacaactgggtgaactcaacatcggcaaagttggagaactggcatcggaaattggcatccagttgttaagccgtgagttcttagcccaaaacttaccgcaaaatctacaaacaactccacaacccgcagcggcggcagccacaccaccagtagaaccatatttagaaattccaggacaaggattgctgggggatttgggtgagcaattatggcagtatgaacagaaggaaactgtagatattgcaccagatattgcaccagatattgcaccagatattgcaccagcatcgattagcttggaggagtcttggccaagtaatctacagcatttgagtgtccaaaatgcagtagcagaaatatctgatgtgatttatgagtatgtaggggaagaacacccagagacggtgaaagcagaagtagaggaagttgtagcctctcccttggcagaaaattgggatcagtcgttaactaatttgcagccacaagtagcccaaactctggatgagttggtggtaaggttggaacaaagtaccagtttagttcaacaactagcttcggaattagcattgcgtgatgcctacggtgggcaaagccatctttcagcaataactcaacgtccgagttttcaactgactgtcactaaccaggcggaaatcttattttaccaaggtttacaacaagctaagtctggtgatttgttggggtctttggctttttatagtcaagctattaaattgcaaccagaatcttacgagtattggtttaatcaagggttgactttgtttcatttacaaaggtttgaagaagcgatcgctgcttatgaccaagctattaatctcaaacctgatttcgctaaagcttggtataaccggggcggagttttgggagagttgggtgattttgatggggcgatcgcttcttttgatcaagctatagagttgaagtctgaataccaagaagcttgggctagtcggggtttagccttgctcaaattaggtctgatttgggaagctatttctagttatgatcaggctttgaaattacaacccgaagatcaggaaacttggtattaccgaggagttgctttgggggtaggtgagcagtttgaagaggcgatcgcttcttatgaccaagctttagaaattcaaccagactattatgaagtgtggattgaccggggtgtggtgctatttaacctcaaacgctggtcagaagcaattgaatcctgggacgaagcattagctattcaatctgatttttacttagcttggtataaccggggcatcgctttagaaaacttgggcagacgcgaagaatctattgaatcctatcaacaagccatcaccattaaacctgattttcacctcgcttggtataatcaagctgtagctttgttttacttgggaagacttacagaagctatttcttgctatgacagcgccttagaaattaaactcgactattgggaagcttggcttggtcgcgccttagccgtggggaatgtggttaataacaaagcatctctgactttacccagtagcatagcgaaatctcatcctaccctcaatcagcgaggttatgagggcaaaatagccacttatgaagaaggtttaaaacatctccgccctgatacccacccagaaggttggggaagattgcatttagcagtgggtaacacccactacgaacacggcaaaaaacaaccttcaccccgctattattggcaacaagcattaactgagtatcaacaagcactattaacacttacttatgaagattttgcagaattgcatctagaagtattgcaagctttaaccaaagtgcttgttgctttaggggaaacagaaacagcacaggaattacaaaaacaaggtctagatttattacaacaattactaaatcaaagcacctgctcggaacaaaacaaaaaactactcgctttgaaatttgcaggtttcatacaattaggagttgatttagcggtaaatgcaggtgatttagtagaagcttgggaaattgctgaacatggcaaaaatacctgtttaaaactacagctttctggtgggagtaatgaaatttattccctcaactatcaacggattcaacaactaatcaatccgcaaactgcggttatttactggcatcttagcccggtggctttacacacctttattattaaatatgatgccccatcaccgctacttttattaacacctatccaagaggtagaagtcataccagaagcagtaaaaaggttagtagaatttgaaagctggctagacttttggcaaaaagaatatcaagaatattgccaaaatcaaaacttagaaaatcccctggaaaattcctggtgtgtggatatggaaggcagattattaaatctgcggaatatcctcaatattcccaccattattcaggaactggaaggaattaccaatctaattttaattccccatcgggatttacacaaattgcctcttcatgtccttttctctcttgcacaaccagatgtaaattacactatccattatctccctagtattcaaacgggtttggatttaaacaccaatgggttatcaaattggcaacagcaaaaattcctaagtgtggaaaatatcaaaccagcaggtaatgagaaaatacaagaagaaatacaatttgttgactttgcagccgcaattgtaaggaaaatgtttgaaaattcccaaaacatccagagttcacaagcgacaaaagagaacttagaaaatgccctagccgcagattataacatcttgcattttactggtcatgcggttaacaatttaagtgaagttgccaaatcggccttagttttagcagatgaagataaactgactttagtagaaattagtcaacagacttttagtaattacaatctgtttacattcacaaattctgaaaatgttagtcataatattcaaaatatcagcagtgaatatgtgggtttaacaactggtttgttaaatagtggtgttccttatgtattgagtacactttggaatgtggaatcatctgctaatgctttagtcatgatagagttttacaacagattactttttcatcactctccagttactgctttagcggaagctacaacttggctaaaagaaataactgttgcagaactgatcacagagtatgaaaatttactcaacaatctgcaaccagaagagttgaaattgagggattttgtcacgatgcaaattgataaacatcgccaattatcacctcaacaacagccttataatcatccttactattgggcgggatttatcattgctggatgtaattgaatggatcttaaaattacacattaccttaaaaactgtgcattttgggtctgataaattagaaaatctggagataacagatagctaaaactattccctattccctattccctgcctcaacgaagggactttttcagcaaaccctatctaggggttgctgagaaagtctttccgtgagggcataggagtcaggagtcaggagtggtaggggcgaagcattagggcgactaattatcaatttttgtccaagcctattttccgaatgcttcgcccgtacaggagtcaggaggagatttgaaaatttctttgccatctcttgaaatccccaaaaatgcacactttttccggtatacccttcaaaacccttgcactaatttc

SEQ ID NO: 144 - DNA, 4716 bp, Sphaerospermopsis sp. LEGE 00249
  LEGE00249_321
ggactggggactggggactggtgactggtgactggtgactggtgactggggactggtgactggtgactactaactaatgactaaaatcagcttttcgagataaaaatcggccaagtctgaaactatgattacagattttagtgaagtttgaatgaattatatataaataagtgaaatcgcttaaccgatccttcacaaactcactcaagcgaggtaattgtttggtgattcaattttagattttagattttagattttagattttagattttagattttagattgtattgagattttatttctctgactacagactcaaatctccacactaaaaactaaaattaccttaaccagtcagttcccagtaccaattaattatcccattaattactgtatcttttgtgaaaaatatcgtattttttcttgatgtgatttttacatttctttactttcaactgtcacatctatggttaacaataagaggcactatcactgagcaatgtataaattacagatttagcttgcttttttgaattttggtttgttgaatggatgatcacaactgaggaataaacagtttacaacatgattaacaacaactatttccagtgatttgaggatcaatgagtagaatttctagatatggcaaaacaatgattaaggtaataaatttgctaagattaagatattgtttgaaaaaaatagtggcaatattatataattacctggctttacaggagcaactaagcaacaaaactgtttaataatttgttttttaattcctatgaatctagaaaataaaacttcaaaaacctttgccctgactacacctctctactatgtaaacgatgttccccatattggtagtgcgtacaccacaatggcagcggatgtagtagccagatttcaacgcttgttaggaaatcaggtactgctgattaccggtacagatgaacatgggcaaaaaatccaaaggtcagcagcaagtttagaaaaaccaccacaggaattttgtgatcaaatagtaccgagtttcatcaacttgtggcaggttctaaatattcaatatgatcgctttagtcgcactaccgctttaaaccatcacgcgattgtaaaagaatttttccaaagagtttgggaaaatggcgacatttatcaaggacaacaaaaaggctggtactgcgtatcctgtgaagaatttaaagaagaacgagaactgttagacggcaaacgctgccctattcatactaccaaagaagtagagtggcgagacgagcaaaattactttttccggttatccaagtatcaaaccccgctagaggaattttaccagtctaggccagattttattcaacctgccagtcgccgtaatgaagtcctcagttttgtcagtcaaggtttacaggatttttccatttcgcgggtaaatctggattggggttttcctgtacctgtagatcctcaacataccctttatgtgtggtttgatgctctgctgggttatgtaaccgcattattagaaccagatgtagaaccaactttagcgaatgctttagaaaaatggtggccgatcaatctccatctgattggtaaagatatattgcggtttcatgcagtctactggccagcaatgctgatgtcagccggtttacctttgccagaaagagtatttggacatggatttttgactaaagatggtcaaaagatggggaaaactctgggtaatacccttgatcctgtagccttagttgaaagttatggtagtgatgccgttcgttattacttccttaaggaaatcgaatttggcaaggatggagattttaatgaaattaggttcattaatgttctcaatgcagatttggccaatgatttaggtaatttgttaaatcgcactttgaacatggtgaaaaaatactgcgctggtaaagttccatcaatcgatccagaagttattcccgctgagaatgctttaaaagcgattggtttagggctgggggaacaggtgaaacaatcttatacagctttagctttcaatgaagcttgccacgttgtgttgtcattagttcaagccagcaataagtttatagatgaacaagcaccttggacattatataaacagggaaaacaggaagaagtggaagcggtgctgtatacggttcttgaatcagtaagactagcagcttatctcctttccccaattattcccaacattagcagcgatatttatcagcaactaggctggggaatcaattttaacaatcaaaaagaaagttcaatggttgcgccttttactacccatgcaacatggggcgtactatcagataaacaacagttgggtacacctcaaccaatttttaaacggatagaactaccaaaaaacaattaacactttccgttttgattgagtgtaaaaaccgaatcgggggcctactttgtttgttgtccccggaatttatcataagccaatctagcaagagtgtaaaagttaatgatttctatcggcaataacatggataacaaccgaggtatgacaatgatgttgaataatttggaaaatgactcgattttttcgccggaacaggttttagaaaatcgcggtcgggtggcgatatttattgatgggtcgaatttattttatgcggctttacagttaggaatcgaaattgattatactaagcttttgtgtcgattaactggaggttctagactattgcgggcttttttctacactggtgtagaccgcacaaatgagaaacagcagggatttttgttgtggatgcgtcgcaatggttatcgagtcattgctaaggatttggtgcagttaccggatggctcaaaaaaagctaacctagatgtggaaatagctgtggatatgatggcgttagtcgattcctatgataccgcagttttggtgagtggtgacggcgatttggcttatgctgtaaattctgtcagttatcgtggtgtcagggttgaggtggtgagtttaagatcgatgaccagtgatagcttaattaatgtgagcgatcgctatattgatttagaagctatcaaggaagatattcaaaaaacaccccgtccaggttatccctatcgaccattatctagtatgggattcttggacgatcctagagatagtcaaggacatttagaaattccagaataatgcaaaattcacaaggcgggaatcagcggagagaatgttcacaacttcagaggggaagtaaatctcactccccccgcttctattattatattttacaaatgctgagaaatttctcttatctgtctttaattttattattgttacttggcttatattcttgcggaaatccatcttctgtaaaaccagaacaggaaagttcagctaaccaaaatacagatagtaagttaacttttttcggtgtggctttagaacagtttgatgaagaaggtagacctatttggaaagtccaagctcaacaagccaagtataccaaagaaacagaaattggtgaagcccaaaatccccaaggcgaactttatcaagatggccaaatagtttatacaattaaagccgaaacagccgatattaagcaagatggtaaacaactgttactcaaaggtaaaattctggctatagatccacggaatggagtagtattacaaggtaatgaattagaatggcgacctgaagaagatttattgattgttcgtaatcaatttaatggtaatcatcaacaattaaaagccacagcacaggaagcaagagtaaaaacccgtgaacagcgaatagaattttcgggaaaagtcgttgctatatcaggtgatccgcaattacaaatgcgaactgagcagttagtttggcttcttaaagaagaaaaattaattggcgatcgccctatcgaaattgaccgttatcaagataataaaataactgatcgtggtagaggaaatggtgctgaagtcaacctcaaaactaaagttgctactcttaaaccccaagcccaattacagttactaaatccagcgatgcagataattagtaactcaatgacttggaatattaaccaagaaatagtaagaacaaatgcccctgtgcgtgtggttcatcaagctgaaaatgtcactgtaactggcaataaagcagaaatgaaaataccagaaaaaacagtttatttaacaggcaatgtaaatgccgtgggcaaaaagaatcaatctttaaaatcaaatcaactcacttggtatttagagaaaaaattattagaagcacagggaaatgtagtttatcgtcaagttgaaccaccattaaactttcaaggtacaacagcagtcggtaatctggaaacagaaaatatagttgttaaaggcggtggttctgataatagagtcatcacagaaattattcctcaagattaaactggggactggggacacttcgacaagctcagtgcatcgctggggactggggacacttcgacaagctcagtgcatcgctggggactggggacacttcgacaagctcagtgcatcgctggggactggggacacttcgacaagctcagtgcatcgctggggactggggacacttcgacaagctcagtgcatcgctggggactggggacacttcgacaagctcagtgcatcgctggggactggggacacttcgacaagctcagtgcatcgctggggactggggacacttcgacaagctcagtgcatcgctggggactgggg

SEQ ID NO: 145 - DNA, 4638 bp, Sphaerospermopsis sp. LEGE 00249
  LEGE00249_327
caggttattttcctgtaagggcgaagcattcgggcgataaattatcaattttgatcacaggttattttcctgtaagggcgaagcattcgggcgataaattatcaattttgatcacaggttattttccgaatgcttcgcccctacttcgcccctacttcgcccctacgactcctgactcctggtataaatagctgcattctaaccgtttaattattcactattaattgcttatgtcttttgtacctttgcatattcacagcgactacagtttgctagacggtgctagtcaactaccagagttagtagatcaggcgatcgcactaggaatgaaagcgatcgccctcacagatcatggtgtcatgtatggcgcagttgaactcatcaaaatctgccgcagtaagactattaagccaattattggcaacgaaatgtatatcattaacggtgatattgaaaaacaagaacgccgtcctaaatatcatcaagttgttttagcaaaaaacaccaaaggttataaaaacctagttaaactcaccacaatttctaatcttaaaggtgtacaaggtaaaggtattttttcccgtccttgcattaataaagatttactcaaacaatataaagaaggtttgattatcaccagtgcttgtttaggaggagaaattccccaagcaattctcagtggtagaccagatgcagcccgaaaagttgccaaatggtataaagaagtatttggcgaagatttttatttagaaattcaagatcacggttctcaagaagacagaattgtcaatgttgaaatagtgaaaattgcccgtgaattaggcattaaatttgttgctactaacgattctcattacatttcttgctttgacgtagaagcccatgacgctttactttgtattcaaactggtaaactaattacagaagataaccggatgcgatatagcggcacggaatatctcaaatctgctgaagaaatgaaactgttatttcgtgatcatttacctgatgatgtcatagaagaagccatagccacaacagttgaagtagcggataaagtcgagccttatcatatcatggatgagccaaaaattcctactcctcccattccttctggtcatactcctgatacttacgctgaagaaatagcttggcaaggactgttagaaagattaaaccgcaaatctcgtaacgaagtagatccagtctacaaagaaagattagagtatgaattaaaaatgattcagcaaatgggtttttctacctactttttagtagtgtgggactatatcaaatttgcgcgagataataatattcccgtcggtcctggtcggggttctgcggctggttcattagttgcttatgccatgcgaattactaatattgatcccgtgcatcatggcttactgttcgagcgatttttgaacccagaacggaaatccatgcctgatattgatacagatttctgtattgaaaaacgggatgaagtaattgattatgtgactagaaaatatggtgtagatagagttgcccaaattatcacttttaaccgtttaacatccaaagcagtattaaaagatgtcgccagagtattagatattccctatggggaagctgataaaatggcgaaaatgatcccagtggtacggggtaaaccaactaaattgaaagtaatggtttctgatcaaacaccagcaccagaatttaaagaaaaatacgataatgatccgaatgttcgccgctggatagatatggccatgcgaatagaaggaactaacaaaacctttggtgttcatgcagcaggtgtggttatttccgcagaaccattagatgaaattgtacccttacaacgtaataacgacggctcagtaattacccagtattttatggaagatttagaatcactgggtttgttaaaaatggactttttgggtttaagaaacctaaccttaattcagaaaaccattgatttaatacaacaaagtaaaggatatcatattgatcctgatgacattacccgtgatgaaagaaaagcccagaaaatattagctaaaggtgaacatagcactttacctaaagatgtatctcaagcatattcattattagaatctggagatttagaaggtatctttcaattagaatcttcaggaatgaagcaaatcgtgagagatttgaaaccttctaatattgaagatatttcttctattttggcattatatagacctggtccattagatgcgggattaattcctaagtttattaaccgtaaacatggtagagaagcaattgattatgaatcgcaacttttacaacctatattaaatgaaacctatggaattatggtttatcaagagcaaattatgaaaattgctcaagatatggcaggttattctttaggacaagctgacttactgcgtcgcgctatgggtaaaaagaaagtagcggagatggaaaaacaaaagcaaaattttatagatggttcagcaaaaaacggtgtaaaaccacaagtagctgaaaaactatttgcggatatgttgaagtttgccgaatattgtttgagttatgaaactgaggttttaactgtagaatatggctttttacctattggggaaattgtggaaaagcggattgagtgtagtgtatttagtgttgataacaatcgtaatgtttacactcaacctattgcccaatggcatcatcggggagtgcaagaattatatgaatattgtttaaatgatggttcaaaaatcaaggcaacaaaagaccataaatttatgactaattctggagaaatgttgcccattgatgagatatttgagagaggtttagacttgttgaaagtcccaaatttaccagcttaaatttaggtttgggatttcaaccattcatctaaatcgttgatatcccgaaaatctaataacgcttctcctaaatcttctaattgtgctattttcaggttactgattttctggatataactatctgtcaattttccaaacctcttagataactgacgcagcagtaagtttgttgcttccaattctctaccttcctgctttgcttcttgatatacccttgtttgtttgatatcattaactaaaaacatcgcttctatctcctgacgggttaattgcgaaaacttcgacaacaacacagtttccaataactctataataccttctctttctgagttgttggtaatttcagtttgcgttctttgcatcaaattcttaactaattctggagcttggttttctttactgacaattaattcaattaaccccatcccaattgaacctgatgatatttcatctaaataaatccgtttgatgcgaccactattgactaattcttgctggtaattagttaatacttccacatctaaactacgtttagcaaacaaagccaccgcttgccaatcttgctgaggtttatattgattgaggtaaatgttgatttctgtaataaattcccagtaaaattccggttttggttgaaattgcacctccacaaaataaatcggtttttctccactatctggcataaatataccatcaaatctaaaggctttttccttcacttctacagatgtgaatttgtaaccttctgctttttctgtcggttctcccagaagttcaaatagtaaagtatggaaagtgagaaaaatctggtaaaatattgtatctgtgtgcattactgatgatataaatttaatatattataccctaaaaaatacccatcgaaattaccaaaaataatttttttgtatcatgctatcattatcatcaatatctagtaatctaagaaagtgtttatctatccgcataagatattaccatgatgaaaatttttcacaacctccgcattttggcaattaccagcttattatgtttaactcttagttggtcattccctgcacaagctaacacgaaaattgatcctcaactagaacagcaagtattagaaattattcgccgaaatcccaaagcaattatcgaaagtgtgcaagcatatcaggaagaacagcaacaaaaagttcaacaagcaagacaggaatttttacaagatttcagaacaaatataaaaggtgtaattggtgattctcccaccacaggttcgacacaattaaaaactgtgttaatagagttttccgactttgaatgtccctactgtgccgaagcaaataaaactctcaaagatttattagcaaaatatcccaatcaattcaccttagtttataaacatttccctttggtgcaaattcatgaccaagcattaccagcagctaaagcagcttgggcagcatatcaacaaggtaaattttggcaatatcatgatgctttgtttacgaatcaaaaacaactgggagaaagtttatatttagatattgcgaaaaatctcaatttagatttagcgaagtttaaacgcgatcgcaatttagcagataaagcaattcaacaagacttacaaatggcttacaaattgggtctttctggtacaccttcttttattatcaatagccagaatgtgactggacctattcagttatcagaaattgagagtattttggagagaggtgacagctaacaggtgactggtttgcgtttgatcctattcctaatcatcctttaattgcgc

SEQ ID NO: 146 - DNA, 4174 bp, Sphaerospermopsis sp. LEGE 00249
  LEGE00249_358
ttgatggataaaagcatttgctgatgtcaacactatactatattatttaattctgacacattttgcctaattttttagtcaacttattccatgtatacgtcaaatacttgtagttttgtatgtacttgtataggtttgtctagtaaattgtcaacttaggacaagctcaataaaatcctccatactttctagggaagttaaccccatagcagcggatacctccgacattttcccattagtacccaggtaaattaccttatccatcccagcaaagccaaagtttttcattaaccgcagcttctgatttaactcatcatcattggtaacaattgcacccccctcaaaggtattcataaacttggtagcatggaagctgaacacctccgcactgccaaaattaccaatcatcttaccaccgtgggaacagccaaaagcatgggaagcatcaaacattaatttcagaccatgtttatccgcaatttccgccagcatttctacatgacaaggttgaccccaaacatgaacccccataatacccgatgtccggggtgtaatcattgactccacccgccaagggttaatagtatgggttttggggtcaatatcacaaaaaaccggagtaatttcttgccattgtaaagcgtgggctgtggcaataaaagtaaaagagggaataattacctcaccctgcaactccaaagcccgaattaccaactctagggcaatagtaccattgcaaaccgctatacaatgtttaacccccaagtagtcagcaatccgctgttcaaattgctgtacaaataccccattattagacagccaacgccgatctaacatatcattaatccgagctaacagccgttctctgttaccaatattcgggcgaccgacatagagtttttctttgaattttgtttcaccgccaaagtaagctagttgtgagagattgttaatcatgaaaaatcctgttttaaaaaagtcaatatcaggtttatacgctaaacctagtaaaagtaagctgttgtgcatttaatttgtataagtggaacaggcaagatgcgtgttccacaagagttcagaatattaggattatacaatttagctgtgtaacagcttactttactatccttgactgattttccttcgttgttaaaaacatttattattttttctaagaggttgtttgaaaagttttagatggtgactttatacacttgcagatcccccctcacagggctatccattataaacatctttcttaacaatcttaaaacctatacttggtaaaggtttcaagacttttgaatttacctgatcttgacaaaatgcacctcatctttattgataaaaacctcattttattgagaatcagcaacggaggattaagggttgggggtctgcaagcgatcgctctcatgaatgttaagaaagatgtgggtaatggatagcttttcaagggggatttagggggatctaaaatttttgatacatcatgagggacttttaaaacatcctctaagacatgatgaggcatagagcgattaatttcgccagctaattcaatgaaacgagtcgttttttcaaattcttttgccttccatatcaaataaaaaggatcgatgggaatgcaatttagccatttcctggaaaatgctatctaaactgcgggtaatttgccagtcgggaaaatggttgtgaattttgcttaggtcactgatatagcaaatgtgatcgccttcgcgatttttatcgacgtaaacggttttcaacggtttatttaaaagctgttccgccttggcgatcgcctccaggacggaaatactgttttttctaccaccacccagattatagacctcaccgcaacggggatgtaaataaaattgatgcaacaaagcacagacatcagatgcgtggatattatcccgcacctgtttacctttataaccgtagattttatattctcttccttctgcacaggctcgcaccacataagctaaaaaaccatggagttcagcagcgctgtgggctgatcccgtcaggcacccgccgcgaaaacaggcggttttcatcccaaagtagcggccatattcctgtaccatcacatccgctgctactttactcgcaccaaataaactatgtttactctggtcaatgcgacaggtttcggtaataccgccatagtcctggggattagcatagtcccaacggctctctagttccaccaatggcaactcattgggggcatcaccatagactttgttagtgctaaggaaacaaaacactgcttcagggcaagcccttctggtggattccagcaggtttagtgtgccaactgcattaacatcaaaatcatcaaagggacgactggcggctaaatcgtgggagggttgagccgccgcgtgaataatcaggtcaaatttttgttctgaaaagaggttcagaatagaggggcgatcgcggatatcaagggagaaatgctgatactccggacagtcaacttgtaaccgctgcaaattccaggtagtgtcaccgtctttgccaaagaagtcggctcgcatattattatcaatacctgtaacctgccagcccagttgggtgaaataacgcaccgattcagagccgattaagccagcggaaccggtgactaacagttgcttatcaaaaggcatattgacaatgaaaaaggtttctaatacaaaaggaaatctatatgtaaaaaaaatacgactaaattaagtagagtaactagataccgagattttcaaaaatagcatctgcgaaaagtattttatcgccggatcgagagcgaaattgctccaagttgccccgataaacaaaacccaaattgcatagatatttgtagatatcatcaaacaggggttgtttttcataaaactcataaaaagaaacctcaataattactagcttggcacttttaaaagtcttctctcctcctttaataacagaaagttcatagccttgtacatccagcttaattaaaatattatccccaatagtttgattgttctcttttacccattggtctaaacaagtttgttgaaccataacactggtattaactgatgattctggccattcttctttatgcagtttagacatattcaacattgaagaactgggggaaaaggaacttgagaacatttgctttgtgccaacttcgtttcctaatgctaaattaaaagttttaatgttagtatcttctgcacataatgaataaagctccttataaacatcaggtaggggttcaaacgaatagatagttgcacccggaaacacatgacgaattgtcctagcaaactgtccctcgttggcaccaatatcgataatactttttatatcaaaattggcaagaaatttataattttctaattctttcattttcttttctcgtttttgtgcttcacgaagattctttagaagcctaatttccaaaccaagagaattgaatattttatgcatcacagctttaatcatagggctagaagattgagtttcaaaagataggttttaaacatataactaggaagtgatcgctaagtttcatagtccaaggcacactggttaaatgcttgagatgtgagtattgcgggattgacaatatggctctttgaggaagtcgccaaaaaccaccacgttgccaacactcataataaacagccttgacgcgctcatcccaaacctcccgactgcttcccaattgatgaggaatctgatacacacctttaactttaaggggcaattttttctgaacataatcaaaaaattgccttgtagcaaaagacaaatgtaatggcgtttgtaagtaccaatgattgcccttaaaccaacgccaagtccaagcatccatatcgccagtgctaatcagcattaccccccccggcttaagtaaatgttctgcctgttttattccctctagtggattgatgagatgctcaaacacatcaaacattgtcaccacatcaaaacaatgatgccactttgaatctatatcttgtaatcgatctgcaataacattaactgctatataaaacctagacaaaactagactttactttctacttcaacgggagcatgggagcagttatccctcagtagactttcacgccttagccagacgcgataaattaattgcagcgtttagatccctatctat
